(19) United States
(12) Patent Application Publication
(10) Pub. No.: US 2009/0142429 A1
(43) Pub. Date: Jun. 4, 2009

(54) SILICIBACTER SP. STRAIN USEFUL FOR GENETIC TRANSFORMATION OF MARINE ALGAE AND PRODUCTION OF ANTIBIOTIC AGENTS

(75) Inventors: Robert Belas, Catonsville, MD (US); Todd R. Miller, Janesville, WI (US); Jesper Bartholin Bruhn, Soeborg (DK)

Correspondence Address: INTELLECTUAL PROPERTY / TECHNOLOGY LAW, PO BOX 14329, RESEARCH TRIANGLE PARK, NC, 27709, US

(73) Assignee: UNIVERSITY OF MARYLAND BIOTECHNOLOGY INSTITUTE, Baltimore, MD (US)

(21) Appl. No.: 11/915,331

(22) PCT Filed: May 23, 2006
(86) PCT No.: PCT/US06/20103

§ 371 Date: Mar. 28, 2008

Related U.S. Application Data
(60) Provisional application No. 60/683,763, filed on May 23, 2005.
(60) Provisional application No. 60/718,542, filed on Sep. 19, 2005.

(51) Int. Cl. A61K 35/00; C12N 1/20; C12N 1/13; A61P 31/04; C12N 15/74; C12P 21/00

(52) U.S. Cl. 424/780; 435/252.1; 435/257.2; 435/471; 435/69.1

(57) ABSTRACT

A Silicibacter sp. strain useful for genetic transformation of marine algae and production of antibiotic agents is described. Silicibacter sp. TM1040 is a genetically tractable member of the marine Roseobacter clade of bacteria that forms an intimate and obligate interaction with algae, and is useful as a probiotic for producing antibacterial agents that are cidally effective against pathogenic bacteria such as Mycobacterium marinum, Vibrio anguillarum, V. coralliilyticus, and V. shiloi bacteria.

### CROSS-REFERENCE TO RELATED APPLICATIONS

[0001] This application claims the benefit of priority of U.S. Provisional Patent Application No. 60/683,763 filed May 23, 2005 in the names of Robert Belas, et al. for “Discovery of a Novel Silicibacter Sp. Strain and Use Thereof for Genetic Transformation of Marine Algae,” and the benefit of priority of U.S. Provisional Patent Application No. 60/718,542 filed Sep. 19, 2005 in the names of Robert Belas, et al. for “Silicibacter Sp. TM1040 Antibacterial Compound Production and Use Thereof.” The disclosures of said U.S. Provisional Patent Application No. 60/683,763 and U.S. Provisional Patent Application No. 60/718,542 are hereby incorporated herein by reference in their respective entireties.

### BACKGROUND OF THE INVENTION

[0002] 1. Field of the Invention

[0003] The present invention relates to a Silicibacter sp. strain, and more particularly, to Silicibacter sp. TM1040 a genetically tractable member of the marine Roseobacter clade of bacteria that forms an intimate and obligate interaction with algae and use of said bacteria for genetically transforming said algae, as well as use of such bacteria as a probiotic agent, alone or in compositions, and antibiotic compounds and compositions derived from such bacteria.

[0004] 2. Description of the Related Art

[0005] Pfiesteria piscicida, Pfiesteria shumwayae, and Pfiesteria-like organisms, such as Cryptoperidiniopsis sp., are estuarine, heterotrophic dinoflagellates with a global distribution. Reports have implicated Pfiesteria sp. as the causative agent of massive fish deaths along the Atlantic Coast of the United States, especially in the estuaries of Pamlico Sound, N.C., and the Chesapeake Bay of Maryland and Virginia (Burkholder et al., 1992). While the toxicity of Pfiesteria species is an important question, other physiological aspects of these dinoflagellates deserve further attention.

[0006] In the marine environment, these dinoflagellates coexist with a diverse community of heterotrophic bacteria. Much of the carbon and nitrogen required for the growth of these bacteria is supplied by the unicellular bloom-forming eukaryotic algae (Cole et al., 1982). During feeding, stress, and lysis, nutrients are released from algae and made available to the bacteria. The nutrient plumes emitted occur on a microscale and are quickly dispersed and diluted by diffusion and turbulence.

[0007] Not all species of bacteria are equally likely to obtain these nutrients (Blackburn et al., 1998). The α-, β-, and γ-proteobacteria, as well as the Cytophaga-Flexibacter-Bacteroides spp., are important members of the marine picoplankton and are often found within algal communities (Giovannoni et al., 2000). Of these groups, the α-Proteobacteria genera phylogenetically related to the Roseobacter clade are of particular interest. Bacteria phylogenetically related to Roseobacter clade are an abundant group of marine bacteria that are associated with algae in both laboratory and field studies. Although many of the bacterial taxa abundant in the marine environments have never been cultured, the Roseobacter clade is an exception and can be readily cultured in the laboratory. They are heterotrophic, Gram-negative, rods, ca. 1.5-2.0 by 0.5-0.75 μm. The majority of its genera are from marine habitats and have a strict requirement for NaCl. Most genera are motile via one or more flagella. Furthermore, some Roseobacter species exhibit close physical (attached and intracellular) or physiological (growth-enhancing) relationships with DMSP-producing dinoflagellates, including Prorocentrum, Alexandrium, and Pfiesteria species.

[0008] In marine surface waters, α-proteobacteria phylogenetically related to Roseobacter spp. are predominantly responsible for the degradation of DMSP, its catabolites, and other sulfonium compounds (Gonzalez et al., 1999). Although Roseobacter spp. are cosmopolitan in nature, their production and activity are significantly correlated with DMSP-producing algae, including dinoflagellates and prymnesiophytes (Gonzalez et al., 1997; Zubkov et al., 2001). Furthermore, some Roseobacter spp. exhibit close physical or physiological relationships with toxic, DMSP-producing dinoflagellates, including Pfiesteria spp. (Alavi et al., 2001) where these bacteria can be found physically attached to and aiding in the growth of the dinoflagellates.

[0009] Dimethylsulfoniopropionate (DMSP) is the major source of organic sulfur in the world's oceans and plays a significant role in the global sulfur cycle (Yoch et al., 1997). During blooms of marine unicellular algae, cellular DMSP is released due to algal senescence, predation, or stress and is degraded by both algal and bacterial enzymes. In marine environments, dinoflagellates and prymnesiophytes are the major producers of DMSP, with intracellular concentrations as high as 0.5 M.

[0010] Bacteria and certain species of phytoplankton produce an enzyme, dimethylpropiothetin dethiomethylase (DMSP lyase) (EC 4.4.1.3), which degrades DMSP to produce dimethylsulfide (DMS) and acrylate (Yoch et al., 1997). Acrylate is readily consumed by bacteria and is converted to β-hydroxypropionate by α- and β-proteobacterial species (Ansede et al. 1997 and 2001). Bacteria may also demethylate DMSP at the DMS moiety, producing 3-methylmercaptopropionate (MMPA), which may be further demethylated to 3-mercaptopropionate MPA or demethiolated to produce acrylate and methanethiol (MeSH). The products of these reactions provide a rich source of carbon and sulfur for bacterial production (Kiene et al., 1996).

[0011] While some bacterial species rely upon high-affinity uptake mechanisms, the ability to sense and move towards increasing chemical gradients, known as chemotaxis, provides motile bacteria with a distinct advantage over their nonmotile counterparts (Blackburn et al., 2001). Some Roseobacter species have developed close associations with dinoflagellates and phytoplankton and these biological interactions between dinoflagellates and bacteria may influence both the rate of primary production and the fate of fixed carbon in the surface ocean.

[0012] Knowledge of how marine bacteria sense and respond to algal cells is therefore important to the understanding of bacterial physiology and the interactions between these prokaryotes and their eukaryotic hosts and ultimately impacts the greater understanding of nutrient cycling in marine ecosystems. Mechanisms for these interactions may rely upon bacterial motility and chemotaxis behavior that allow these bacteria to sense and move towards their eukaryotic host, where they derive beneficial nutrients, once in close physical proximity to the dinoflagellate.

[0013] Thus, it would be of great benefit to isolate native bacteria that coexist and interact with dinoflagellates to determine how these bacteria assimilate dinoflagellate-derived nutrients and are intrinsically propagated within the ecological environment with the dinoflagellates. Further, it would be of great benefit to discover native bacteria that can transfer gene material to the dinoflagellates for expression therein.

[0014] Recent studies have demonstrated that probiotic bacteria may be used to control pathogenic organisms in fish larval rearing (12, 26), and one of several promising candidates is bacteria of the marine Roseobacter clade. The ability of Roseobacter to inhibit other bacteria was first noted by Ruiz Ponte et al. (25) who used Roseobacter gallaeciensis strain BS107 as a probiotic treatment of scallop larvae (26). Roseobacter strains have also been isolated from turbot larval farms where they were selected from this environment due to their strong anti-Vibrio activity (9, 12, 13).

[0015] Brinkhoff et al. (8, 15) recently demonstrated that the inhibitory compound produced by the Roseobacter strain T5 is the sulfur-containing molecule, tropodithietic acid. This is a precursor of the antibacterial compound thiotropocin isolated from a marine isolate of Agrobacterium (27), a species now recognized as a member of the Roseobacter clade (28). Another strain, Roseobacter strain 27-4, also produces thiotropocin or tropodithietic acid (their chemical similarity makes it difficult to distinguish between the two), which constitutes as much as 15% of metabolite production (9).

[0016] Several environmental factors affect tropodithietic acid production. Production of tropodithietic acid is correlated with a brownish pigment since non-pigmented (mutant) colonies are devoid of antibacterial activity (8, 9). However, the brownish pigment is not the primary bioactive compound as the full bioactivity of the extract was found in fractions and the pigment was not eluted from the column. It is also known that thiotropocin or tropodithietic acid is stable at different pH, but incubation temperature influences the activity, which declines rapidly with increasing growth temperature. The antibacterial activity is very sensitive to culture aeration, since the antibacterial compound is only found under static growth conditions. Static growth conditions also cause roseobacters to grow as multicellular rosettes (star-shaped aggregations of bacteria) (9, 14, 24, 28). Thus, tropodithietic acid production is positively correlated with static growth in marine broth at temperatures between 15-24° C. and is associated with the formation of a brown pigment and rosettes of cells.

[0017] The dramatic growth in the aquaculture sector (an increment of 9-10% per year over the last 8-10 years) has emphasized the importance of disease control in all ages of animal husbandry from larva to adult. Bacterial diseases are important constraints, especially in recirculating aquaculture systems, and may be treated with antibiotics. However, due to the risk of development and transfer of antibiotic resistance, alternative disease control measures must be implemented. Vaccines have been very successful also in fish farming, however, vaccines are not efficient at the larval stages. “Greenwater” (unicellular algae plus their associated microbial flora) is routinely used as a probiotic in recirculating aquaculture systems. Several studies have demonstrated that probiotic bacteria may be used to control pathogenic organisms in fish larval rearing and in adults (12, 26). Therefore, since Roseobacter often physically attach to algae and dinoflagellates (10, 11, 16), there is a potential to use these bacteria, either by themselves or together with greenwater, as a probiotic in the prevention of diseases of finfish and shellfish.

[0018] Thus, it would be of great benefit to isolate native bacteria that have a potent antibacterial activity that is effective in killing pathogenic bacteria not only in fish but also mammals.

### SUMMARY OF THE INVENTION

[0019] In one aspect, the present invention provides for an isolated Silicibacter sp. microorganism for interaction with the estuarine dinoflagellate Pfiesteria piscicida and increasing growth of same, the Silicibacter sp. comprising a 16S ribosomal subunit nucleic acid sequence selected from the group consisting of:
[0020] (a) a nucleic acid sequence that has more than 95% identity to a nucleic acid sequence of SEQ ID NO 2; and
[0021] (b) a nucleic acid sequence fully complementary to a nucleic acid of (a); and
[0022] wherein the isolated microorganism interacts with marine algae to modify growth thereof.

[0023] In another aspect, the present invention relate to delivery device for delivering a nucleotide sequence encoding a protein of choice for expression by an algae, the method comprising a Silicibacter sp. microorganism comprising SEQ ID NO: 1.

[0024] In another aspect, the present invention provides for a newly discovered strain of Silicibacter sp. comprising a 16S nucleotide sequence. (SEQ ID NO: 2)

[0025] In yet another aspect, the present invention relates to an algae cell transfected with a DNA or RNA comprising at least one nucleotide sequence selected from the group consisting of SEQ ID NO. 3, SEQ ID NO. 4, SEQ ID NO. 5, SEQ ID NO. 6, SEQ ID NO. 7, SEQ ID NO. 8, SEQ ID NO. 9, SEQ ID NO. 10, SEQ ID NO. 11, SEQ ID NO. 12, SEQ ID NO. 13 and SEQ ID NO. 14.

[0026] In another aspect the present invention relates to a protein of choice production system, comprising algae transfected with a recombinant Silicibacter sp. strain, wherein the Silicibacter sp. strain comprises a nucleotide sequence encoding for the protein of choice and at least one nucleotide sequence selected from the group consisting of SEQ ID NO. 3, SEQ ID NO. 4, SEQ ID NO. 5, SEQ ID NO. 6, SEQ ID NO. 7, SEQ ID NO. 8, SEQ ID NO. 9, SEQ ID NO. 10, SEQ ID NO. 11, SEQ ID NO. 12, SEQ ID NO. 13, and SEQ ID NO. 14.

[0027] In another aspect, the present invention relates to a delivery vector for delivery genes from a bacterium to a plant cells, the delivery vector comprising a Silicibacter sp. strain comprising: vir genes whose function is involved in the transfer of DNA from the bacterium to plant cells. Preferably, the Silicibacter sp. TM1040 strain is used to deliver genes encoding a protein of choice to marine algal species.

[0028] In yet another aspect, the present invention relates to a method for delivering a nucleotide sequence encoding a protein of choice, the method comprising the steps of:
[0029] inserting nucleotide sequences encoding for the protein of choice into plasmid comprising at least one vir genes of Silicibacter sp. TM1040 strain of SEQ ID NO. 1;
[0030] infecting marine algae with the Silicibacter sp. strain and maintaining suitable condition for expressing the protein of choice by the marine algae; and
[0031] recovering the protein of choice.

[0032] A method for producing a heterologous peptide in an algae cell, the method comprising the steps of:
[0033] (a) transforming the algae cell with at least one nucleotide sequence selected from the group consisting of SEQ ID NO. 3, SEQ ID NO. 4, SEQ ID NO. 5, SEQ ID NO. 6, SEQ ID NO.7, SEQ ID NO. 8, SEQ ID NO. 9, SEQ ID NO. 10, SEQ ID NO. 11, SEQ ID NO. 12, SEQ ID NO. 13, and SEQ ID NO. 14 and a gene encoding the heterologous peptide;
[0034] (b) culturing the transformed algae cell under conditions that allow for expression of the gene encoding the heterologous peptide, thereby obtaining the peptide.

[0035] In a further aspect, the present invention provides for an antibacterial composition comprising isolated Silicibacter sp. TM1040, hereinafter TM 1040.

[0036] In another aspect, the present invention provides for an antibacterial composition comprising extracts and/or cell-free filtrates obtained from culture supernatants of TM1040 having a potent antibacterial activity that is effective in killing several pathogenic bacteria.

[0037] In yet another aspect, the present invention relates to an antibacterial composition comprising extracts and/or cell-free filtrates obtained from culture supernatants of TM1040 having a potent antibacterial activity that is effective in killing Mycobacterium marinum, Vibrio anguillarum, V. coralliilyticus, and V. shiloi bacteria.

[0038] A still further aspect of the present invention relates use of Silicibacter sp. TM1040, in a liquid culture, cell pellet (either wet or dehydrated), or the supernatant fluid from a culture of TM1040 as a probiotic composition that has applicability in coral reef maintenance or in commercial aquaculture of fin- and shellfish for prophylactic, preventative treatment or curative treatment of bacterial diseases or to improve growth and weight gain. The probiotic composition may be added to or cultured with greenwater in aquaculture feeds or mixed with algal feed prior to feeding. The bacteria could be provided alive, frozen, or dehydrated to be revived upon rehydration. Since TM1040 is a “natural” agent, it is compatible in the natural environment for treating fish diseases or preventing the bleaching of coral reefs.

[0039] Still a further aspect of the present invention relates to the use of Silicibacter sp. TM1040 as a producer of antibiotics against bacterial diseases of humans and animals, as a probiotic in commercial aquaculture and the aquarium fish hobby trade, and as an agent to maintain coral health and prevent coral bleaching, both in the coral reef hobby trade, as well as in the wild.

[0040] In yet another aspect, the present invention relates to Silicibacter sp. TM1040 that is grown using large-scale fermentation system for isolation and extracting of the culture medium isolates having antibacterial activity. Preferably, the Silicibacter sp. TM1040 is grown under shaking and aeration mode to increase production of antibacterial extracts.

[0041] Yet another aspect of the present invention relates to a method for producing antibacterial extracts from Silicibacter sp. TM 1040 by fermentation, the method comprising:
[0042] culturing the Silicibacter sp. TM1040 in a culture medium suitable for the growth of the bacterium and production of antibacterial extract; and
[0043] separating the extract from the culturing medium.

[0044] In yet another aspect, the present invention provides for a biofouling/biofilm inhibitor comprising a sufficient amount of TM1040 bacteria or extract therefrom to prevent or reduce the accumulation of other organisms on submerged marine surfaces including the hulls of ships, sonar domes, or any underwater surface. Preferably, TM1040 adheres to surfaces to establish a biofilm that produces antibacterial activity, preventing the attachment of other bacteria. Further, the purified compound(s) in the TM1040 supernatant may be added to paints or other materials applied to submerged surfaces.

[0045] In another aspect, the present invention relates to inclusion of genes responsible for the TM1040 antibacterial activity in an expression vector to be transfected into a compatible bacteria that is found in mammal thereby extending the antibiotic activity into humans or other animals. For example, common intestinal bacterium such as E. coli may be used so that these bacteria would become part of the animal's intestinal flora and produce the antibacterial activity. This could eliminate the need for adding antibiotics to the animal's feed as is currently practiced.

[0046] Other aspects and advantages of the invention will be more fully apparent from the ensuing disclosure and appended claims.

### BRIEF DESCRIPTION OF THE FIGURES

[0047] FIG. 1 shows the pathways involved in the catabolism of DMSP. Degradation of DMSP can occur by the lyase pathway, which involves the hydrolysis of the C-3 carbon of DMSP, producing acrylate and DMS (reaction 1), or by a series of demethylation steps (reactions 2 to 5). The first step in the demethylase pathway is demethylation of the DMS moiety of DMSP, producing MMPA (reaction 2). MMPA may be further demethylated to MPA (reaction 4), followed by the elimination of hydrogen sulfide (reaction 5), yielding acrylate, or in a demethiolation reaction (reaction 3), producing acrylate and MeSH. In some cases, the DMS produced by the lyase pathway may be oxidized to dimethyl sulfoxide (reaction 6).

[0048] FIG. 2 shows representative GC-FID chromatograms of DMS. DMSP in Pfiesteria dinoflagellates was detected as DMS, the major peak in each chromatogram (retention time, 2.6 min), after alkaline hydrolysis of DMSP. The numbers to the left of the DMS peak represent the peak area. The concentration of DMSP, as DMS, was determined by measurement of the peak area and comparison to a set of known standard concentrations of DMSP. The peaks shown were obtained from cultures containing 37,642 P. piscicida cells per ml and 50,985 P. shumwayae cells per ml. The minor peaks that display shorter retention times than DMS are not associated with DMSP, DMS, or other DMSP catabolites.

[0049] FIG. 3 shows the degradation of DMSP by Pfiesteria and Pfiesteria-like dinoflagellate cultures. DMSP was added to dinoflagellate cultures that contained both the dinoflagellates and their associated bacteria, and the loss of DMSP was measured over time using GC-FID. The results are presented for Cryptoperidiniopsis sp. strain CCMP1829 (•), P. piscicida CCMP1830 (▪), P. piscicida CCMP1921 (▴), P. piscicida CCMP1834 (▾), and P. shumwayae CCMP2089 (♦), and the negative control was medium alone (◯). The error bars represent the standard errors in three separate experiments with each culture.

[0050] FIG. 4 shows degradation of DMSP by mixed communities of culturable heterotrophic bacteria obtained from either Pfiesteria or Pfiesteria-like dinoflagellate cultures. Production of the DMSP catabolites, acrylate, DMS, MeSH, and MMPA was measured after 1 mM DMSP was added to the mixed bacterial suspensions. Shown are the mixed bacterial communities obtained from P. piscicida CCMP1830 (A), Cryptoperidiniopsis sp. strain CCMP1829 (B), and P. shumwayae CCMP2089 (C). The production of DMSP catabolites, MeSH (▪) and DMS (•), was measured using GC-FID (left axis), while the production of MMPA (▴) and acrylate (◯) was measured using high-performance liquid chromatography (right axis). These experiments were repeated three or more times with similar results.

[0051] FIG. 5 shows the degradation of DMSP by four pure-culture isolates of bacteria obtained from cultures of P. piscicida CCMP1830. (A) The data are presented as the percentages of 100 μM DMSP remaining after incubation with either bacterial strain TM1035 (▪), TM1038 (•), TM1040 (♦), or TM1042 (▴), or the control (◯), 100 μM DMSP without inoculum. (B) Comparison of the production of the DMSP catabolites (DC), MMPA, DMS, and MeSH, by the four bacterial strains after 3 h of incubation in the presence of 1 mM DMSP. The error bars represent the average standard error from three separate experiments.

[0052] FIG. 6 shows the kinetics of DMSP metabolism in four DMSP-degrading bacterial isolates from cultures of P. piscicida 1830. The symbols represent the amounts of DMSP (◯), MMPA (▴), MeSH (▪), and DMS (•) measured in the cultures of TM1035 (A), TM1042 (B), TM1038 (C), and TM1040 (D). The graphs represent an average data set whose mean was reproducible over several repeated experiments.

[0053] FIG. 7 shows the taxonomic analysis of the four DMSP-degrading bacteria isolated from P. piscicida. The phylogenetic tree was inferred from comparative sequence analysis, using 1,047 bp of 16S rDNA, generated by the neighbor-joining method and the Jukes-Cantor distance algorithm. The resulting tree shows the relationships among the Roseobacter clade bacteria associated with P. piscicida CCMP1830; strains TM1035, TM1038, TM1040, and TM1042; and nucleotide sequences of other known Roseobacter clade bacteria. Bootstrap values (n=1,000 replicate resamplings) are indicated for the neighbor-joining method where values are >500. An ‘f’ or ‘p’ indicates that the Fitch or parsimony method (respectively) is in agreement with the neighbor-joining tree. Bar=0.1 units of evolutionary distance.

[0054] FIG. 8 shows a TEM of Silicibacter sp. strain TM1040. A culture of TM1040 was prepared in half-strength 2216 marine broth and grown for 20 h at 30° C. without agitation. Motile cells were blotted onto copper disks, stained with 1% uranyl acetate, and visualized by TEM. Three simple lophotrichous flagella attached to the pole of the cell are apparent (arrow). Bar=0.5 μm.

[0055] FIG. 9 shows the effects of starvation on the chemotactic response of Silicibacter sp. strain TM1040. The chemotaxis of unstarved versus starved cells to 200 μM methionine was measured using the capillary assay (Materials and Methods). Chemotaxis of starved cells to either methionine (black bars) or buffer lacking nutrient (white bars) is compared to the response of unstarved cells either to methionine (dense cross-hatched bars) or to the buffer lacking nutrient (sparse cross-hatched bars). The response factor, calculated by dividing the mean number of bacteria in methionine-filled capillaries by the mean number of bacteria in buffer-filled capillaries, is significantly increased in the starved cells (▪) compared to that in the unstarved cells (◯). The values shown are the mean and standard deviation (n=12).

[0056] FIG. 10 shows the chemotaxis of Silicibacter sp. strain TM1040 toward cell homogenates. Chemotaxis of TM1040 toward heated (80° C.) (white bars) and untreated (black bars) homogenates was measured using the capillary chemotaxis assay (Materials and Methods). The response factor is calculated by dividing the mean number of bacteria in homogenate-filled capillaries by the mean number of bacteria in buffer-filled capillaries. The chemotactic response of TM1040 to the untreated dinoflagellate homogenate is >2.5 times greater than the response to either algal or bacterial homogenates, and heating the dinoflagellate homogenate reduces the response factor by ca. 40%. The values shown are the mean and standard deviation (n=8).

[0057] FIG. 11 shows screening of putative attractant compounds using the qualitative chemotaxis assay. Chemotaxis behavior of TM 1040 was assessed using BM glycerol motility agar on which a compound to be tested is placed (indicated by the dot to the left of the swimming colony). (A) Chemotaxis of Silicibacter sp. strain TM1040 through BM glycerol motility agar results in an ever-increasing colony of motile bacteria that is punctuated by one or more internal bands of bacteria (indicated by the arrows) and the periphery (diamondhead arrow). Shown is the response of TM1040 to DMSP (B), methionine (C), valine (D), arabinose (E), and fructose (F). In the presence of either DMSP, methionine, or valine, the outer ring is disturbed and becomes asymmetrical, indicating a chemotactic response from the cells. In contrast, neither arabinose nor fructose causes a change in the symmetry of the colony, suggesting that TM1040 does not respond to these compounds.

[0058] FIG. 12 shows quantitative measurement of the chemotactic response of Silicibacter sp. strain TM1040 to pure compounds. Chemotaxis of TM1040 was assessed using the capillary assay with a subset of potential attractants discovered using the qualitative assay. Capillaries were filled with either buffer (as a control) or 2 μM (white bars) or 200 μM (black bars) attractant. The response factor was calculated by dividing the mean number of bacteria in attractant-filled capillaries by the mean number of bacteria in buffer-filled capillaries. DMSP and amino acids produced the strongest chemotactic response from TM1040. NAG, N-acetylglucosamine; Pro, propionate; AKG, α-ketoglutarate. The values shown are the means and standard deviations (n=12).

[0059] FIG. 13 is a cladogram showing the homology of Silicibacter sp. TM1040 Vir protein homologs with known Vir and Tra proteins from other bacterial species. GenBank accession numbers are used for the homologs.

[0060] FIG. 14 shows the genetic map of the Silicibacter sp. TM1040 vir gene loci. The first locus contains homologs to virD2 and virD4, required for producing the coupling protein and energetics of DNA transfer. The second locus, physically separated from the first locus by ca. 16 kb, includes homologs encoding VirB1-B6 and VirB8-B11. The VirB proteins function in the synthesis of the channel, chaperones, and pilus structures required for cell-cell contact transfer of the DNA.

[0061] FIG. 15 shows the visualization and co-localization of Silicibacter sp. TM1040 cells interacting with P. piscicida. Bacteria were pre-stain with a fluorescent tracer dye and added to washed P. piscicida zoospores. After two hours, samples were removed, chemically fixed, and viewed by phase contrast (A) and fluorescence microscopy (B). (C) The phase-contrast and fluorescent images of the same specimen were overlaid, and the bacteria co-localized with the dinoflagellate cells as described in Materials and Methods. Numerous clusters of fluorescent bacteria can be seen colocalized to a crescent-shaped area within the periphery of a settled zoospore. The bar represents 10 um.

[0062] FIG. 16 shows serial Z-section composite image of the interaction between Silicibacter sp. TM1040 and P. piscicida. The bacteria were fluorescently labeled as described in Materials and Methods, and the samples were chemically fixed and visualized using confocal microscopy. Optical Z-section slices through individual dinoflagellates were captured in 0.5 μm increments to create a series of images through the Z-axis of the cell (proximal to distal surface of the zoospore). The resulting series was then color coded according to depth (Z-axis length) and merged into a single image, where objects tinted in green are nearer the viewer, those in shades of red and pink are in the midsection of the dinoflagellate cell, and objects near the distal surface are represented in shades of blue. Many of the bacterial cells are observed to co-localize to the middle depths of the image, suggestive of being in or near the cytoplasm of the dinoflagellate. The bar represents 10 μm.

[0063] FIG. 17 shows the motility screening of transposon-insertion mutants. Mutant strains obtained from random transposon insertional mutagenesis were screened for their ability to swim through semi-solid Mot agar. This assay identifies mutations in genes encoding structural components of the flagellum, hook basal body, and motor, chemotaxis signal transduction proteins, as well as global regulators of flagellar gene transcription. Clockwise from upper left are Silicibacter sp. TM1040 (wild-type motility), plus three strains with motility defects (TM2014, TM2017, and TM2038). Strains TM2014 and TM2017 are non-motile by this assay, while TM2038 produces flares of motile cells.

[0064] FIG. 18 shows that non-motile mutants lack flagella. Flagellar filaments were observed by phase-contrast microscopy after staining with silver nitrate according to the method of West et al. (1977). (A) Silicibacter sp. TM1040 (wild type); (B) TM2014; (C) TM2017, and (D) TM2038. The arrows point to flagellar filaments observed in both the wild-type and TM2038 cells. The bar represents 1 μm.

[0065] FIG. 19 shows the mutation in strain TM1038 leads to elongated cells. The cellular morphology of Silicibacter sp. TM1040 and the three Mot-mutant strains was observed by phase-contrast microscopy after incubation of the cells to the mid-exponential phase of growth. The cells of the parent (strain TM1040; A), TM2014 (B), and TM2017 (C) possess wild-type cell morphology, with a mean cell length of ca. 1.6 μm, while cells of strain TM2038 (D) are elongated (mean of 6.9 μm). The bar represents 5 μm.

[0066] FIG. 20 shows the genomic analysis of the mutations leading to Mot− phenotype. Mot-strain TM2014 has a transposon insertion in a gene of unknown function (henceforth referred to as flaA) that resides in a group of genes with the same transcriptional orientation, and that appear to encode proteins required for flagellar export and/or rotation. The mutation in TM2017 affects a gene that encodes a protein with strong homology to CckA, while the mutation in TM2038 lies in a gene whose deduced amino acid sequence has homology to CtrA. In other genera, CckA, a histidine kinase, and CtrA, a DNA-binding response regulator, compose a two-component regulatory circuit that regulates flagellar synthesis and other metabolic functions.

[0067] FIG. 21 shows the serial Z-section composite images of the interaction between Mot− mutants of Silicibacter sp. TM1040 and P. piscicida. The labeling of the bacteria and preparation of the composite Z-section images for confocal microscopy is as described in Materials and Methods. The depth of an object is color-coded, such that green objects are nearer the viewer (on the proximal facing surface), reds and pinks are in the midsection of the zoospore, and blue objects are distal. The panels show composite Z-section images of (A) Silicibacter sp. TM1040, (B) TM2014 (flaA), (C) TM2017 (cckA), and TM2038 (ctrA) associated with a dinoflagellate zoospore. The two arrows in panel A denote TM1040 cells at the same depth as a food vacuole. All three mutations reduce the number of bacteria found to co-localize with the midsection of the zoospore.

[0068] FIG. 22 shows the quantitative measurement of the effect of Mot− mutations on bacterial attachment to the dinoflagellate cell. Wild-type and Mot− strains of Silicibacter sp. TM1040 were fluorescently labeled and incubated with washed zoospores. Following fixation, the samples were examined by confocal microscopy, and the depth of each bacterial cell determined relative to the proximal and distal surfaces of the dinoflagellate. The mean number of bacteria on the surface (black bars) or co-localized to the interior of the dinoflagellate (white bars) for each strain was determined as a percentage relative to wild-type cells. (A) The percent of wild-type co-localization to either the surface or interior of the dinoflagellate for TM1040 (wild type) and each Mot− mutant (TM2014, TM2017, and TM2038). (B) The percent of dinoflagellates in the population observed to possess bacteria on their surface or co-localized to their interior. Heat-killed Silicibacter sp. TM1040 cells served as a negative control in these experiments. Asterisks indicate that the mean of that sample is significantly different from the mean of the wild-type cells (P<0.05; n=180).

[0069] FIG. 23 shows the growth of axenic P. piscicida zoospores in the presence and absence of Silicibacter sp. TM1040 and three Mot− mutant strains. Add-back experiments were performed to analyze the contribution of wild-type and Mot− cells on the growth of P. piscicida. The panels show (A) P. piscicida and (B) Rhodomonas sp. prey algal cell density over the period of the experiment (9 days). The symbols represent: () Silicibacter sp. TM1040; (◯) no bacteria control; (□) heatkilled TM1040 cells; (⋄) TM2014 (flaA); (♦) TM2017 (cckA); and, (∇) TM2038 (ctrA).

[0070] FIG. 24 shows the analysis of the bacterial community in P. piscicida add-back experiments. DGGE of the PCR products amplified using an oligonucleotide primer set specific for eubacterial 16S rDNA was performed to ensure only Silicibacter sp. TM1040 or one of the three Mot-mutants populated the axenic P. piscicida cultures. This PCR results in a single, rapidly migrating DNA product from Silicibacter sp. TM1040 genomic DNA (lower band). A plastid DNA band amplified from the Rhodomonas sp. prey algal, added to all cultures, serves as an internal positive control (upper DNA band) and indicates the presence of the prey algal.

[0071] FIG. 25 shows testing results of extracts of TM1040 for their ability to inhibit the growth of V. anguillarum.

[0072] FIG. 26 shows that TM1040 grown with vigorous shaking produced a much larger zone of inhibition than the in a static mode.

[0073] FIG. 27 shows testing results of extracts of TM1040 for their ability to inhibit the growth of M. marinum.

[0074] FIG. 28 shows testing results of extracts of TM1040 for their ability to inhibit the growth of V. coralliilyticus.

[0075] FIG. 29 shows testing results of extracts of TM1040 for their ability to inhibit the growth of V. shiloi.

### DETAILED DESCRIPTION OF THE INVENTION

[0076] In the marine environment, dinoflagellates coexist and interact with a diverse community of bacteria and other microorganisms. These interactions can be studied in monocultures of dinoflagellates obtained from environmental samples. Within these cultures, bacteria native to the algal niche assimilate dinoflagellate-derived nutrients and are intrinsically propagated with the dinoflagellates in continuous subcultures. The bacterial community inhabiting several Pfiesteria dinoflagellate cultures isolated from the Chesapeake Bay, Md. was characterized. All of the dinoflagellate cultures examined contained one or more Roseobacter spp. representing the second most abundant clone obtained from 16S ribosomal DNA (rDNA) clone libraries. In addition, several bacteria were found attached to these dinoflagellates by using fluorescent in situ hybridization and confocal scanning laser microscopy. After a stringent washing procedure to remove unattached bacteria, the predominant bacterial species present was a bacterium closely related to Sulfitobacter pontiacus, a Roseobacter clade organism. Also, a Roseobacter sp. was found to be necessary for the growth of Pfiesteria in culture.

[0077] The present invention provides methods and compositions to create novel plasmids and vectors for transfecting algae. The present invention further provides novel methods and compositions for the generation of novel plasmids in stably transformed algae cells. Additionally, the novel plant plasmids produced in accordance with the present invention provide a valuable means for replicating and/or expressing a heterologous DNA sequence or gene in plants or plant cells, preferably algae cells. These heterologous DNA sequences or genes are typically associated with the production of proteins that make a plant more useful (e.g. proteins associated with or conferring herbicide resistance, disease resistance and/or crop yield), useful proteins to be recovered from plants or plant cells and proteins that cause the synthesis of chemicals or compounds that make a plant or plant cells more useful agriculturally or medicinally.

[0078] To date, several methodologies exist which provide for the delivery of DNA sequences into plants. These delivery systems include whole virus infection, the Agrobacterium Ti plasmid systems, free DNA application to abraded or cut plant surfaces, and free DNA introduction into plant protoplasts by means of, for example, polyethylene glycol, calcium phosphate, poly-L-ornithine, micro-injection, or electroporation. It is understood by those skilled in the art that the plasmid systems of the present invention will provide another system for delivering to plants, and preferably algae.

### Example 1

[0079] The production of DMSP by P. piscicida and P. shumwayae was measured and DMSP catabolism by the Pfiesteria cultures was assessed and the bacterial communities associated with them. New dinoflagellate-associated roseobacters capable of DMSP degradation by both the lyase and demethylation pathways were isolated and identified. The results show that both P. piscicida and P. shumwayae contain significant levels of DMSP. The DMSP contents of the two Pfiesteria species (3.44 to 4.25 μM) (Table 1) are similar to those measured in other dinoflagellates.

TABLE 1
Intracellular DMSP contents of Pfiesteria species

| | | Intracellular DMSP | | |
|---|---|---|---|---|
| Species | Strain | (pg per cell) | Cell vol (nl) | DMSP (μM) |
| P. piscicida | 1830 | 0.41 | 0.69 ± 0.12 | 3.44 ± 1.00 |
| P. shumwayae | 2089 | 0.40 | 0.55 ± 0.02 | 4.25 ± 1.47 |

[0080] For example, the intracellular DMSP concentrations in photosynthetic species, such as Prorocentrum, Gymnodinium, and Amphidinium species, are reported to be 1 to 10 μM (Keller et al., 1996). Interestingly, the concentration of DMSP in another heterotrophic dinoflagellate, Crypthecodinium cohnii, has been reported to be 10 μg per cell (Keller et al, 1996), a value that is much higher than those observed in either Pfiesteria species (about 0.4 μg per cell). This difference undoubtedly reflects physiological and taxonomic differences between Pfiesteria and Crypthecodinium and underscores the difficulty in making general statements about DMSP physiology among taxonomically diverse dinoflagellate species.

[0081] Both P. piscicida and P. shumwayae contain significant levels of DMSP, yet the P. piscicida cultures that include dinoflagellates plus associated bacteria degrade DMSP at significantly higher rates as shown in FIG. 3. Thus, it is conceivable that differences in the compositions of the bacterial communities may affect the rates of DMSP decomposition in P. piscicida and P. shumwayae cultures. The data in FIG. 4 showing the difference between DMSP catabolite kinetics in the mixed culturable heterotrophic bacteria support this idea. Other factors may also be important, including the possibility that slow-growing bacteria in the P. shumwayae culture may have a low rate of DMSP degradation or that the concentration of DMSP used may have a deleterious effect specific to the P. shumwayae bacterial community.

[0082] Four DMSP-degrading bacterial isolates were obtained from P. piscicida cultures and were found to be phylogenetically related to members of the Roseobacter clade as shown in FIG. 7. As shown in the taxonomic tree, two of the isolates (TM1035 and TM1042) are most closely related to Roseovarius species, while TM1038 and TM1040 are unique Roseobacter species not related to known roseobacters. Despite their taxonomic differences, all four bacteria shared the common trait of demethylating DMSP to MMPA, while strains TM1035 and TM1042 further metabolize DMSP to produce DMS, indicating that demethylation is a major pathway by which Pfiesteria-associated roseobacters degrade DMSP. Equally interesting are the DMSP demethylation pathways used by these strains. As an example, TM1038 demethylates DMSP to produce MMPA and MeSH, a pathway that appears to be commonly used by marine bacteria (Kiene et al. 1996). In contrast, TM1040 strictly demethylates DMSP to produce MMPA without MeSH, a pathway reported to be used by one other aerobic marine bacterium, strain BIS-6, isolated from Biscayne Bay, Fla. (Visscher et al., 1994). This bacterium demethylates DMSP to MMPA as shown in FIG. 1, reaction 2, followed by a further demethylation to MPA, reaction 4. Although not measured in this study, TM1040 is likely also to produce MPA instead of MeSH, as has been observed for BIS-6.

[0083] The two Roseovarius-related strains, TM1035 and TM1042, are capable of both demethylation and lyase cleavage of DMSP. The presence of dual demethylation-lyase pathways in the same organism is a recently discovered phenomenon. Gonzalez et al. (1999) reported that 5 out of 15 DMSP-catabolizing bacteria isolated from Georgia coastal seawater and the Caribbean Sea catabolized DMSP to produce both DMS and MeSH, as well as converted MMPA to MeSH. One of these five isolates was taxonomically identified as R. nubinhibens ISM. The capacity to use both DMSP pathways may provide these bacteria with a survival advantage, especially in environments where DMSP concentrations are high, such as the phycosphere surrounding DMSP-producing dinoflagellates. Bacteria that utilize the lyase cleavage pathway are capable of growing on DMSP as a sole carbon source (Yoch et al., 2002). In contrast, while the demethylation pathway does not always lead to increased growth (Jansen et al., 2001), much of the sulfur obtained from this pathway is utilized for protein synthesis and seems to be preferred over other sources of sulfur abundant in seawater (Kiene et al, 1999). Thus, coupling of both DMSP-degradative pathways in the same organism may satisfy both the carbon and sulfur requirements of these dinoflagellate-associated marine bacteria.

[0084] In analyses of DMSP catabolism, it was occasionally observed that the sum of the DMSP catabolites produced did not always equal the amount of DMSP lost from the culture. There are several possible explanations for this. First, bacterial enzymes may have degraded the DMSP catabolites shortly after they were produced. This is a strong possibility in light of the high reaction rates observed. A good example supporting this is the failure to detect acrylate production in either TM1035 or TM1042, despite the presence of detectable levels of DMS, which constitutes the other half of lyase cleavage of DMSP. The absence of acrylate is most likely due to rapid conversion, a finding that was also noted by Ansede et al. (Ansede et al., 1999), who, using nuclear magnetic resonance analysis, were unable to detect acrylate production by a Roseobacter species even though DMS was produced. The present results also agree with environmental studies that show rapid degradation of acrylate by bacterial communities associated with algal cells or debris (Osing a et al., 1997).

### Material and Methods

### Dinoflagellate Strains and Culturing.

[0085] Dinoflagellate cultures of P. piscicida CCMP1830, CCMP1921, and CCMP1834; Cryptoperidiniopsis sp. strain CCMP1829; and P. shumwayae CCMP2089 (Provasoli-Guillard National Center for Culture of Marine Phytoplankton) were grown as previously described (Alavi et al 2001). The dinoflagellates were fed the prey alga Rhodomonas sp. strain CCMP768 continuously as needed. Rhodomonas sp. was grown in 35 practical salinity units (psu) F/2 medium lacking silica at 20° C. under a 14-h light, 10-h dark cycle (Guillard et al., 1975). For all assays, the dinoflagellates were grown to a maximum cell density of approximately 10⁵ per ml, whereupon feeding was stopped for 36 h, which allowed complete removal of the Rhodomonas algae (monitored by inverted microscopy).

### Bacterial Strains and Media.

[0086] Bacteria were isolated from P. piscicida CCMP1830 culture by first spreading a 10-fold dilution series of the dinoflagellate culture on 0.5× Zobell marine agar 2216 (18.7 g of Difco marine broth 2216, 15 g of Difco Bacto Agar, and 1,000 ml of distilled H₂O), hereafter referred to as marine agar. After 5 to 7 days of incubation at 30° C., colonies with unique morphologies were picked at random and streaked to purity on marine agar, resulting in the strains TM1034 to TM1042. The bacterial cultures were used after incubation in marine broth (same as marine agar but lacking the agar) at 30° C. in a shaking water bath for 1 to 3 days. Escherichia coli INVαF′ was grown in Luria-Bertani (LB) broth (Ausubel, F. M. 2001) or on LB agar containing 1.5% Bacto Agar (Becton Dickinson, Franklin Lakes, N.J.).

### Chemicals

[0087] DMSP was synthesized from acrylate and DMS according to the method of Chambers et al., 1987. The purity of the resulting DMSP was confirmed by chemical analyses, including flash point, melting point, and total C, H, O, N, S, and Cl (Galbraith Laboratories, Inc., Knoxville, Term.). MMPA was synthesized by alkaline hydrolysis of its methyl ester, methyl-3-(methylthio)propionate (Aldrich, Milwaukee, Wis.) (Jansen et al., 1998). Other organic sulfur compounds were purchased from Aldrich. All chemicals used were of the highest purity commercially available.

### DMSP Content and Metabolism.

[0088] To measure the DMSP contents of the dinoflagellates P. piscicida CCMP1830 and P. shumwayae CCMP2089 and the prey alga Rhodomonas sp. strain CCMP768, cells were grown to a maximum density of approximately 10⁵ per ml in 500-ml batch cultures, except for Rhodomonas sp., which was grown in 1-liter batch cultures to a maximum density of 10⁶ cells per ml. The abundance and cellular volume of the cells were measured in the 7- to 20-μm-diameter particle range from three or more 1-ml samples of culture using a Coulter Multisizer II particle counter (Becton-Dickinson). Because the particle counter does not distinguish between Pfiesteria dinoflagellates and Rhodomonas prey algae, all dinoflagellate cultures were starved to reduce the Rhodomonas population to below detectable limits.

[0089] DMSP was measured in 2-ml whole-culture aliquots and in concentrated cell lysates. To obtain concentrated cell lysates, 200-ml culture aliquots were centrifuged at 4,000×g for 15 min and the cell pellets were resuspended in 2 ml of sterile distilled water on ice. For Rhodomonas sp. strain CCMP768, multiple cell pellets were combined and resuspended in a final 2-ml aliquot of sterile distilled water. A cell homogenate of each sample was then obtained using a Sonic Dismembrator sonicator (Fisher, Hampton, N.H.). DMSP was measured in 2-ml samples as described in “Analytical techniques” below.

[0090] To measure the degradation of DMSP by dinoflagellate and prey algal cultures, cells were grown as described above and the cell density was normalized across all cultures to 10⁴ per ml by diluting the cultures with sterile medium. DMSP was added to the culture from a sterile neutralized stock at a final concentration of 200 μM, and its degradation was measured at intervals throughout the duration of the experiment, as described in “Analytical techniques” below.

[0091] The catabolism of DMSP by the bacterial component of each culture was measured in suspensions containing a mixture of dinoflagellate-associated bacteria that were isolated as follows. A 10-fold dilution series of each dinoflagellate culture at peak dinoflagellate density (approximately 10⁵ cells per ml) was spread on marine agar and incubated at 30° C. for 5 days. The resulting colonies from plates containing 50 to 200 colonies were resuspended from the agar surface using sterile 10-psu artificial seawater (Instant Ocean, Mentor, Ohio) and washed twice by centrifugation at 14,000×g, whereupon the optical density was normalized to 0.6 at 600 nm for each suspension. An aliquot of DMSP was then added from a sterile neutralized stock to a final concentration of 1 mM, and DMS, MeSH, MMPA, and acrylate were measured as described in “Analytical techniques” below.

[0092] DMSP catabolism was also measured in four bacterial strains (TM1035, TM1038, TM1040, and TM1042) isolated from the dinoflagellate culture. Each strain was grown in a 50-ml marine broth culture amended with 1 mM DMSP to induce the production of enzymes necessary for DMSP catabolism. The cultures were grown to an optical density at 600 nm of 0.6 and washed twice with sterile 10-psu artificial seawater. DMSP was added to a final concentration of either 0.1 or 1 mM, and 1-ml aliquots of the bacterial cultures were dispersed into 26-ml serum bottles. The bottles were immediately capped with a butyl rubber septum and incubated at 30° C. with shaking. At intervals throughout the experiment, samples were sacrificed for measurement of DMSP, DMS, MeSH, acrylate, and MMPA as described below.

### Analytical Techniques.

[0093] DMSP was measured as DMS following alkaline hydrolysis. An aliquot of the sample was added to a 26-ml serum bottle with the addition of an equal volume of either 5 M NaOH or distilled water, and the bottle was capped with a butyl rubber septum. Solutions of pure DMSP at 1 to 500 μM dissolved in distilled water were prepared in exactly the same manner in parallel with each experiment. After overnight incubation, DMS resulting from alkaline hydrolysis of DMSP was measured in 500 μl of headspace gas using a Hewlett-Packard 5890 gas chromatograph equipped with flame ionization detection (GC-FID). DMS produced without alkaline hydrolysis was subtracted from the total, and the result was compared to DMS produced from the hydrolysis of pure DMSP standards to obtain the final molar concentration of DMSP in the unknown sample. The retention time of DMS was determined by injecting 50 μl of headspace gas from a capped serumbottle containing 5 μl of pure DMS that had completely volatilized.

[0094] DMS and MeSH production in the cultures was measured by direct sampling of 500 μl of headspace gas without prior alkaline hydrolysis of the sample. The concentration of DMS was determined using standard curves generated from known concentrations of DMS produced by complete alkaline hydrolysis of known amounts of DMSP. The concentrations of gaseous MeSH in the cultures were determined from standard curves using a dilution series of pure MeSH gas.

[0095] The presence and concentrations of acrylate and MMPA in the cultures were measured by high-performance liquid chromatography (Agilent [Palo Alto, Calif.] 1100 equipped with diode array detection) and a Zorbax XDB C₁₈ column (2.1 by 150 mm; 5-μm pore size) (Agilent) according to the method of Ansede et al. 1999.

### Statistics.

[0096] The Mann-Whitney test for two independent samples was used to compare the DMSP contents of P. piscicida CCMP1830 and P. shumwayae CCMP2089. The apparent first-order rate constants for DMSP degradation and catabolite production by bacterial strains TM1035, TM1038, TM1040, and TM1042 was calculated using a linear least-squares regression analysis of the data, where the slope of the line equals the first-order rate constant (r>0.90).

### DNA Methods.

[0097] Chromosomal DNA was extracted from bacterial cells by routine methods (Sambrook et al., 1989) and used as a template in a PCR to amplify the near-full-length (approximately 1,300-bp) 16S rDNA gene. The PCR conditions were as previously described (Alavi et al., 2001). The resulting PCR products were analyzed by electrophoresis using a 1.0% agarose gel in 1×TAE (Ausubel, 2001) to confirm the presence of a single 1,300-bp product, which was then excised from the gel using a sterile razor blade, purified using the QIAGEN gel extraction kit, and cloned into the TA cloning vector pCR2.1 (Invitrogen, Carlsbad, Calif.) under the ligation conditions recommended by the manufacturer. Plasmid DNA was transformed into E. coli INVαF′ competent cells (Invitrogen). Transformants were selected and screened for DNA insertion using LB agar containing kanamycin (80 μg per ml) plus X-Gal (5-bromo-4-chloro-3-indolyl-β-D-galactopyranoside; 40 μg per ml). White colonies, i.e., those harboring recombinant plasmids, were picked at random and grown overnight with antibiotic selection. Plasmid DNA was extracted by alkaline lysis and purified by standard methods using a cesium chloride gradient. The presence of a near-full-length 16S rDNA insert was confirmed by agarose gel electrophoresis analysis of EcoRI-digested plasmid DNA. The nucleotide sequence of each 16S rDNA was determined as previously described (Alavi et al., 2001).

### Nucleotide Sequence Analysis and Phylogenetic-Tree Construction.

[0098] The construction of phylogenetic trees was done as described by Alavi et al. 2001.

### Nucleotide Sequence Accession Numbers.

[0099] The GenBank accession numbers for the 16S rDNA sequences used to generate phylogenetic trees are as follows: Roseovarius tolerans, Y11551; Roseovarius sp. strain DFL-24, AJ534215; marine bacterium ATAM407-61, AF359525; Sagittula stellata, U58356; α-proteobacterium GMD29C12, AY162070; Roseovarius nubinhibens, AF098495; uncultured Rhodobacter LA1-B32N, AF513928; Roseobacter sp. strain LA7, AF513438; marine bacterium HP29w, AY239008; α-proteobacterium MBIC1887, AB026492; Silicibacter lacuscaerulensis, U77644; Silicibacter pomeroyi, AF098491; marine bacterium P20, AY082668; Reugeria atlantica, AF124521; Reugeria algocolus, X78313; Roseobacter gallaciensis, Y13244; Sulfitobacter mediterraneus, Y17387; Roseobacter denitrificans, X69159; Roseobacter litoralis, X78312; Sulfitobacter sp. strain GAI-37, AF007260; Sulfitobacter sp. strain GAI-21, AF007257; Sulfitobacter pontiacus, Y13155; and Sulfitobacter sp. strain EE36, AF007254. The nucleotide sequences incorporating 1,300 bp of the 16S rDNA gene from strains TM1035, TM1038, TM1040, and TM1042 have been deposited in the GenBank database under accession numbers AY332660, AY332661, AY332662, and AY332663, respectively.

### Results

[0100] DMSP content of P. piscicida and P. shumwayae.

[0101] FIG. 2 shows representative chromatograms of DMSP in cell lysates from each Pfiesteria species. The internal cell volumes for P. piscicida and P. shumwayae were determined to be 0.69 and 0.55 nl, respectively; thus, the average intracellular DMSP concentration of P. piscicida is 3.44 μM, while that of P. shumwayae is estimated to be 4.25 μM as shown above in Table 1. Statistical analyses show that the mean DMSP concentrations and the mean intracellular volumes for the species are not significantly different (P>0.05).

[0102] Intracellular DMSP was not detected in the Rhodomonas prey algal cultures, even when 1.000-fold more cells were used for the analysis. Thus, Rhodomonas sp. strain CCMP768 is not a significant source of DMSP in the Pfiesteria culture. While DMSP was readily detectable in Pfiesteria cell lysates, it was not found in either supernatants or whole-cell samples.

### Degradation of DMSP by Dinoflagellate Cultures.

[0103] Cultures of P. piscicida, P. shumwayae, and a taxonomically similar dinoflagellate, Cryptoperidiniopsis sp., lacking Rhodomonas, as well as a culture of the prey algae, were analyzed for the ability to degrade DMSP. While Rhodomonas cultures failed to degrade DMSP (data not shown), P. piscicida and Cryptoperidiniopsis cultures degraded exogenously added DMSP within 20 to 30 h of incubation as shown in FIG. 3. In contrast, the P. shumwayae culture was much slower to degrade DMSP, requiring >72 h to achieve complete degradation of the DMSP (data not shown). P. piscicida CCMP1830, Cryptoperidiniopsis sp. strain CCMP1829, and P. shumwayae CCMP2089 were chosen for further analysis.

### DMSP Catabolism by the Dinoflagellate-Associated Bacterial Consortium.

[0104] The contribution of the bacterial community in the dinoflagellate cultures to degrading DMSP was assessed. Three separate mixed communities of culturable heterotrophic bacteria from cultures of P. piscicida CCMP1830, Cryptoperidiniopsis sp. strain CCMP1829, and P. shumwayae CCMP2089 were isolated, and their abilities to degrade DMSP were measured. The bacterial suspensions from the P. piscicida and Cryptoperidiniopsis cultures catabolized DMSP, initially producing DMS and acrylate, followed by the production of MMPA and MeSH as shown in FIGS. 4A and B. The concentrations of MeSH and DMS were consistently much higher (˜100-fold) than the concentration of either MMPA or acrylate. In general, the concentrations of the DMSP catabolites eventually decreased over 20 h, except for MeSH gas, which continued to increase throughout the period. In contrast to these results, the bacterial suspension obtained from the P. shumwayae culture produced only DMS and acrylate and failed to produce either MMPA or MeSH. These data demonstrate that one or more species of DMSP-degrading bacteria are associated with the P. piscicida and Cryptoperidiniopsis dinoflagellates and that both the demethylase and lyase pathways are active. Since the bacterial communities from both the P. piscicida CCMP1830 and Cryptoperidiniopsis sp. strain CCMP1829 cultures showed similar profiles of DMSP catabolism, only bacteria from the P. piscicida CCMP1830 culture were selected for further analysis.

### DMSP Catabolism by Isolated Dinoflagellate-Associated Bacteria.

[0105] Using inocula from the P. piscicida CCMP1830 culture, nine bacterial strains were isolated, representing a range of colony phenotypes. An analysis of the rate of DMSP degradation showed that four of the nine strains degraded DMSP within a 4-h period, as shown in FIG. 5A while the other five showed little or no ability to degrade DMSP (data not shown). Strain TM1040 appeared to degrade DMSP fastest, followed by strains TM1035 and TM1042, with strain TM1038 being the slowest DMSP degrader. Three distinct colony morphologies were apparent in the four DMSP-degrading strains. Strains TM1035 and TM1042 were similar and produced small (1- to 1.5-mm-diameter), translucent, smooth colonies with a light-pink pigment. Strain TM1038 also produced light-pink colonies with a translucent appearance, but they were much smaller (0.2- to 0.7-mm diameter). TM1040, on the other hand, gave rise to colonies that were larger (4- to 6-mm diameter), translucent, and smooth with a brownish-yellow pigment that diffused throughout the agar medium.

[0106] The production of DMSP catabolites by each of the four bacterial isolates was assessed 3 h after addition of exogenous DMSP, as shown in FIG. 5B. All four strains produced the primary demethylation product of DMSP, MMPA, while three strains (TM1035, TM1038, and TM1042) also produced the secondary demethiolation product, MeSH. Among the three MeSH-producing strains, TM1038 produced significantly more MeSH, while TM1035 and TM1042, but not TM1038, produced DMS from DMSP in addition to MMPA. These data indicate that TM1035 and TM1042 possess both the DMSP lyase and demethylation pathways.

[0107] The kinetics of DMSP degradation and catabolite production were examined in greater detail and the results are shown in FIG. 6. Strains TM1035 and TM1042 have similar colony morphologies (medium size; pink), suggesting that they may be taxonomically closely related. The two strains also produce some of the same DMSP catabolites; however, they differ in both the

TABLE 2
Rates of DMSP metabolism of four bacterial strains
isolated from P. piscicida CCMP1830 culture.

| | | | | Rate of DMSP |
|---|---|---|---|---|
| | Rate of production (pM/h)^{a} | | | degradation |
| Strain | MM | MeSH | DMS | (pM/h)^{a} |
| TM1035 | 19.5 | NA^{b} | 22.7 | 95 |
| TM1038 | 15.9 | 132 | NP^{c} | 22.3 |
| TM1040 | 5.1 | NP | NP | 91 |
| TM1042 | 17.9 | 9.1 | 59 | 32.6 |

^{a}Rates of DMSP degradation an production of DMSP catabolites calculated based upon the slope of the linear portion of each came from FIG. 6.
^{b}NA p < 0.90.
^{c}NP. catabolite not detected or produced by this strain.

rate of DMSP degradation and the rate of production of DMS. Strain TM1035 removed ˜33% (330 μM) of the added DMSP during a 3-h period and produced ˜65 μM DMS, 60 μM MMPA, and 16 μM MeSH as a result. Production of DMS and MMPA occurred within 30 min, with MeSH production following 1 h later. On the other hand, strain TM1042 removed 19% (190 μM) of the added DMSP during the same 3-h period, producing 236 μM MeSH, 38 μM DMS, and 73 μM MMPA, FIG. 6B. Production of these compounds occurred simultaneously and within 30 min. The first-order rate constants for DMSP degradation and catabolite production were calculated from linear regions of FIG. 6 and are presented in Table 2.

[0108] TM1035 and TM1042 produced MMPA at similar rates (19.5 and 17.5 μM per h, respectively). MeSH production by strain TM1035 was highly variable across replicate experiments. Therefore, it was not possible to compare the rates of MeSH production in these two strains, although TM1042 always produced higher levels of MeSH as shown in FIG. 5B. TM1042 also had a lower rate of DMSP degradation (32.6 μM per h) than TM1035 (95 μM per h) and a higher rate of DMS production (59.0 μM per h) than TM1035 (22.7 μM per h). These data suggest that, while they produce similar colony phenotypes, TM1035 and TM1042 are physiologically unique, at least in their metabolism of DMSP.

[0109] Strain TM1038 produced both the demethylation and demethiolation products MMPA and MeSH, respectively, but no products of the lyase pathway. The strain removed ˜33% (330 μM) DMSP during a 4-h period, producing 502 μM MeSH and 61 μM MMPA, as shown in FIG. 6C. Of the four strains, TM1038 was slowest in degrading DMSP (22.3 μM per h) but had the highest rate of MeSH production (132 μM per h), which was at least an order of magnitude above that of TM1042. The rate of production of MMPA by TM1038 (15.9 μM per h) was quite similar to those of TM1035 (19.5 μM per h) and TM1042 (17.5 μM per h).

[0110] The fourth strain, TM1040, catabolized DMSP to produce only MMPA. The cells removed ˜7% (70 μM) DMSP in a 3-h period while producing only 15 μM MMPA (FIG. 6D). Thus, strain TM1040 has a high rate of DMSP degradation (91 μM per h), but a very low rate of MMPA production (5.1 μM/h), compared to the other three DMSP-degrading strains (Table 2).

### Taxonomic Identification of DMSP-Degrading Bacteria.

[0111] A taxonomic analysis of the DMSP-metabolizing strains placed the four isolates in the α-Proteobacteria, closely related to the Roseobacter clade, as shown in FIG. 7. Strains TM1042 and TM1035 are closely related to each other (99% identity; 1,306 of 1,310 bp) and cluster with another dinoflagellate-associated bacterium, strain ATAM407_{—}61, isolated from the dinoflagellate Alexandrium lustanicum (Hold et al., 2001). Both TM1035 and TM1042 are also more distantly related to R. tolerans from Ekho Lake (96% [1,246 of 1,294 bp] and 96% [1,248 of 1,294 bp] identity, respectively), which, like strains TM1035 and TM1042, is capable of producing both DMS and MeSH from DMSP (Gonzalez et al., 2003).

[0112] The sequences of TM1038 and TM1040 16S rDNAs show the greatest similarity to 16S rDNA sequences obtained from bacteria within the Roseobacter clade, yet they did not cluster well with any cultured organisms within this clade and are unrelated to any of the well-characterized Roseobacter species listed in GenBank. As shown in FIG. 7, the 16S rDNA from TM1038 was 95% (1,230 of 1,282 bp) homologous to rDNA obtained from an uncharacterized bacterium isolated from marine snow, HP29w (Gram et al., 2002). Similarly, strain TM1040 grouped with an uncharacterized α-proteobacterium, MBIC1887 (99% sequence identity; 1,275 of 1,284 bp), and to a lesser extent showed some relatedness to two well-characterized Silicibacter species, S. pomeroyi and S. lacuscaerulensis. Both of these Silicibacter species are capable of DMSP degradation (Gonzalez et al., 2003).

### Example 2

### Chemotaxis of Silicibacter sp. Strain TM1040

[0113] Next, it was determined and discussed the mechanics of how and why the Silicibacter sp. strain TM1040 maintains its interaction with P. piscicida. TM1040 possesses three lophotrichous flagella (shown in FIG. 8) and is highly motile, leading to an understanding that TM1040 interacts with P. piscicida through a chemotactic response to compounds produced by its dinoflagellate host. A combination of a rapid chemotaxis screening assay and a quantitative capillary assay were used to measure chemotaxis of TM1040. To help identify the essential attractant molecules within the homogenates, a series of pure compounds were tested for their ability to serve as attractants. The results show that TM1040 is strongly attracted to amino acids and DMSP metabolites, while being only mildly responsive to sugars and the tricarboxylic acid cycle intermediates. Adding pure DMSP, methionine, or valine to the chemotaxis buffer resulted in a decreased response to the homogenates, indicating that exogenous addition of these chemicals blocks chemotaxis and suggesting that DMSP and amino acids are essential attractant molecules in the dinoflagellate homogenates.

### Bacteria and Media.

[0114] Silicibacter sp. strain TM1040 was isolated from a culture of the dinoflagellate P. piscicida CCMP1830 (Provasoli-Guillard National Center for Culture of Marine Phytoplankton) and was maintained on either HIASW agar (25 g of heart infusion broth [Difco], 15 g of artificial seawater [ASW; Instant Ocean], 16 g of Bacto Agar per liter) or half-strength 2216 marine agar. Liquid broth cultures were made with half-strength 2216 marine broth. Marine motility agar was prepared by supplementing half-strength 2216 marine broth with 3.0 g of Bacto Agar per liter. For the chemotaxis plate assay, a basal minimal (BM) medium (12.1 g of Tris HCl, 1.0 g of NH₄Cl, 0.0075 g of K₂HPO₄, 15 g of ASW, 3.0 g of Bacto Agar per liter; pH 7.6) was used. After autoclaving, the BM medium was cooled to 50° C. and supplemented with 0.2 g of FeSO₃ and 1 ml of Balch's vitamins, and a single carbon source (glycerol, glucose, succinate, or alanine) was added to a final concentration of 10 mM.

### Dinoflagellates and Cultivation.

[0115] P. piscicida CCMP1830 was grown as previously described (Alavi et al. 2001). Dinoflagellates were fed a diet of the cryptomonad prey alga Rhodomonas sp. CCMP768, supplied as described by Alavi et al., 2001.

### Chemotaxis Plate Screening Assay.

[0116] A qualitative chemotaxis screening method, described by DeLoney-Marino et al. (2003), was used with only slight modification. An isolated colony of TM1040 was inoculated in the center of a BM-glycerol motility agar plate. After 3 days, a point where the bacteria had swam outwards 5 cm from the site of inoculation, an inoculum taken from the outer ring of the motile colony was used to inoculate the center of a second fresh BM-glycerol motility agar plate. Following 36 h of incubation, a putative attractant was placed approximately 5 cm from the site of inoculation (or 2.5 cm in front of the periphery of motile cells). Possible chemoattractant compounds were administered as either a sterile solid or concentrated stock solutions. The cells were further incubated for 16 h to allow for additional outward movement, at which time measurement of diameter, shape, and chemotaxis rings internal to the motile colony were made. The resulting data were scored on a plus-minus scale, where minus indicates no change compared to distilled water or no attractant controls and either one or two pluses indicates moderate to strong alteration in motile colony phenotype (respectively). All chemotaxis assays were performed in a 30° C. walk-in incubator at 65% relative humidity.

### Quantitative Capillary Chemotaxis Assay.

[0117] The capillary method of Adler (1966), as modified by Palleroni (1976), was used to quantitatively measure the chemotactic response of TM1040 toward a subset of compounds screened by the plate method. A broth culture of TM1040 was grown overnight in half-strength 2216 marine broth at 30° C. to an optical density at 600 nm (OD₆₀₀) of 0.3 to 0.4, which corresponds to the mid-exponential phase of the Silicibacter sp. strain TM1040 growth cycle. The cells were pelleted by centrifugation at 4,000×g in a tabletop centrifuge (Centra-CL2; International Equipment Company), the supernatant was discarded, and the pellet was resuspended in chemotaxis buffer (CB) (15 g of ASW, 6 g of Tris-HCl per liter [pH 7.6]) to the same OD. Five hundred microliters of washed cells was placed in one of the wells of the Palleroni chamber, followed by a 1-μl capillary (Microcaps; Drummond) filled with a putative attractant diluted in CB. This process was repeated for each of the four wells in the chamber. A capillary filled with CB only was included in each experiment as a negative control. Depending on the experiment, capillaries remained in the chambers for 0.5 to 2 h, after which time they were removed, and the contents of each capillary were serially diluted in CB. Final dilutions were then spread on HIASW agar plates and incubated for 16 h at 30° C. The concentration of TM1040 in each capillary was derived by counting the CFU on each plate and multiplying by the appropriate dilution factor. To normalize all data, a “response factor” as described by Wei and Bauer (Wei et al., 1998) was calculated by dividing the mean number of bacteria in the attractant-filled capillaries by the mean number of bacteria in control capillaries.

[0118] The capillary assay was also used to measure the reduction in chemotaxis through competition when a known attractant was supplied exogenously (i.e., outside the capillary). In this variation, the quantitative capillary method was used, but a known attractant was included in the CB used to suspend the washed cells. A capillary containing a mixture of potential chemoattractant molecules was then placed in the chamber and incubated as described earlier. At the completion of the assay, the percent reduction in chemotaxis was calculated using the following formula: % reduction=[1−(CFU ml⁻¹_{exogenous}/CFU ml⁻¹_{control})]×(100).

### Preparation of Cell Homogenates.

[0119] Dinoflagellates and Rhodomonas sp. were grown to late exponential phase (ca. 10⁵ to 10⁶ cells per ml), and the cell density was measured using a Coulter Counter (model M/SZRII; Beckman Coulter). Dinoflagellates were harvested after starvation of the culture to remove Rhodomonas prey algae, which was confirmed by microscopy. The cell densities in P. piscicida and Rhodomonas cultures were normalized to 10⁵ cells per ml, and each culture was then pelleted by centrifugation at 4,000×g and 4° C. for 10 min. The supernatant was removed, and the pellets were separately resuspended with either 1 ml of ice-cold distilled water or CB. The cells were homogenized by sonication (Sonic Dismembrator; Fisher), and cell disruption was assessed by microscopy. To examine the heat sensitivity of chemotaxis elicitors, an aliquot of each homogenate was heated to 80° C. for 15 min prior to the assay. All homogenates were then stored at −20° C. When required, the homogenates were thawed, held on ice, and used in the capillary assay as described.

[0120] Bacterial homogenates were prepared in a similar manner. Briefly, an aliquot from several 10-fold dilutions of the P. piscicida culture was inoculated onto half-strength 2216 marine agar and incubated until bacterial colonies were evident. Approximately 1,000 mixed colonies were then resuspended from the agar surface using 10 ml of CB, and the cells were collected by centrifugation at 4,000×g for 10 min. The bacterial pellet was resuspended to an OD₆₀₀ of 0.3 in CB. Aliquots of the bacterial suspension were sonicated, and a portion was heated, as described above.

### Video Microscopy.

[0121] To compare the motility of TM1040 with and without an attractant, cells were grown and prepared as described for in the capillary assay. A sample of the washed cells was incubated at 30° C., with and without the addition of 10 mM succinate (in CB, pH 7.0). Cell swimming and behavior over a 5-h period were measured using phase-contrast microscopy (Nikon Optiphot BX60) equipped with a digital video camera (Canon Elura, Lake Success, N.Y.). After examination of the entire video, three separate fields were chosen, and 1-min intervals of each were transferred to a computer for further analysis, using Adobe (San Jose, Calif.) Premier version 6.0 software. Individual 0.33-s frames were exported as a tagged image file format sequence and reassembled with IPLab version 3.55 (Scanalytics, Fairfax, Va.) as a sequence of ordered frames (t-series). The numbers of motile and nonmotile cells per field were determined to determine the average percentage of motile cells per field.

[0122] Transmission Electron Microscopy (TEM).

[0123] Silicibacter sp. strain TM1040, taken from the periphery of a motile colony growing in semisolid BM glycerol motility agar, was inoculated in half-strength 2216 marine broth and incubated at 30° C. to an OD₆₀₀ of 0.3. A 400-μm-mesh carbon-coated parlodion copper grid was floated over a 30-μl aliquot of this culture for 1 to 2 min and blotted dry. Bacteria adhering to the grid were stained two times for 30 s with 1% uranyl acetate and 0.04% tylose in distilled water. Negatively stained cells were viewed using a Philips BioTwin CM120 transmission electron microscope at an operating voltage of 20 kV. The resulting images were recorded on film and scanned into a computer, and the brightness and contrast were changed for optimum viewing using Adobe Photoshop 7.

### Analytical Techniques.

[0124] The concentration of DMSP in 1 ml-samples of heated or boiled 200 μM DMSP and in heated and untreated P. piscicida homogenates was measured using gas chromatography with flame ionization detection, as previously described.

### Chemicals.

[0125] DMSP was synthesized from acrylate and dimethylsulfide as previously described.

### TM1040 Possesses Three Lophotrichous Flagella.

[0126] Prior to beginning studies of chemotaxis, motile cells of TM1040 were visualized by TEM to confirm the presence, number, and location of flagella, as shown in FIG. 8. TM1040 is a small (ca. 1.0- to 1.5-μm) rod- or oval-shaped bacterium with at least three lophotrichous flagella. These flagella are located at one end of the cell, slightly off-center from the cell pole. An analysis of the structure of filaments suggests that they are simple filaments, rather than the complex forms found in Silicibacter pomeroyi DSS-3 (González et al., 2003) or other α-proteobacteria (Schmitt et al., 1974).

### Chemotaxis of TM1040 is Enhanced by Prior Starvation.

[0127] Initial observations suggested that TM1040 cells held for 1 to 2 h in CB (a starvation condition) were more responsive to methionine than cells that had not been starved (data not shown). To examine this more closely, chemotaxis of starved and unstarved TM1040 toward methionine was measured by using a quantitative capillary assay. As shown in FIG. 9, starving the bacteria of nutrients prior to the assay resulted in a greater maximal response to the attractant, which was maintained for at least 2 h. This can be seen by comparing the starved-cell response to methionine to the unstarved response to methionine in FIG. 9. After 0.5 h, the mean concentration of bacteria in methionine-filled capillaries was 5.3×10⁷ CFU per ml and increased thereafter, with increasing exposure time rising from 1.8×10⁸ CFU per ml at 1 h to a maximum of 2.4×10⁸ CFU per ml at 1.5 and 2 h. By contrast, without starvation the maximum mean concentration of bacteria in methionine-filled capillaries reached a peak of 2.1×10⁸ CFU per ml at 1.5 h and decreased thereafter. The bacterial concentration in control capillaries for either starved or unstarved cells reached an equilibrium of 2×10⁷ CFU per ml after 0.5 h.

[0128] The difference between the chemotactic responses of starved and unstarved cells is also shown in FIG. 9. The response factor is calculated by dividing the concentration of bacteria in attractant-filled capillaries by the concentration of bacteria in control capillaries (Wei et al., 1998). The response factor of starved cells to methionine is higher than the response of unstarved cells at all times except 0.5 h (where equilibrium has yet to be reached). Significantly, a comparison of the response factors of starved cells and unstarved cell confirms that starvation improves the chemotactic response of TM1040 and maintains it longer.

### Motility is Affected by Starvation.

[0129] The motility of the starved TM1040 cells was measured by light microscopy. While starvation enhanced the chemotactic response, it also reduced swimming motility, and prolonged starvation resulted in a majority of the cells becoming nonmotile. After 2 h, the percentage of motile cells under starvation conditions decreased drastically to a mean of 5.93% (n=69), and by 4 h all of the cells were nonmotile (n=66). In comparison, the percentage of motile cells under nonstarvation conditions did not change after 5 h and was similar to the percentage of motile cells after 1 h (mean, 26.64%; n=69). Thus, while starvation stimulates chemotaxis, it also depletes the energy supplies required to rotate the flagella. Based on these results, a starvation period of 1.5 h was considered optimal and was used in all further capillary assays.

### TM1040 is Attracted to Dinoflagellate Homogenates.

[0130] Does TM1040 sense and respond to dinoflagellates? To determine this, chemotaxis of TM1040 toward cell homogenates of P. piscicida and other constituents of the dinoflagellate culture was measured using the capillary assay. It is important to emphasize that the P. piscicida culture normally contains three different types of organisms: the dinoflagellates, the prey algae (Rhodomonas sp.), and a diverse bacterial population that includes TM1040. Rhodomonas can be virtually eliminated from the cultures through attrition from dinoflagellate feeding, but the bacterial community cannot be removed without adversely affecting the dinoflagellates themselves. So, a strategy was developed to measure the chemotaxis of TM1040 towards three cell homogenates: dinoflagellates plus associated bacteria, Rhodomonas, and a mixture of heterotrophic bacteria obtained from the same dinoflagellate culture. In this manner, the relative contribution of each population towards eliciting a chemotactic response from TM1040 could be assessed.

[0131] As is shown in FIG. 10, TM1040 responded strongly to P. piscicida homogenates, producing a response factor of 6.4. This response is mediated in part by heat-labile compounds because heating of the same homogenates prior to the assay reduced the response by 36% (response factor=4.1). TM1040 is substantially less chemotactic to Rhodomonas homogenates, and this response did not change upon heating of the algal homogenate, remaining at a mean of ca. 2.5. Equally, bacterial homogenates were also poor elicitors of TM1040 chemotaxis, giving a mean response factor of only 1.9 and 1.7, with or without heating, respectively. These results indicate that TM1040 is more strongly attracted to components present in P. piscicida cell homogenates, some of which are heat labile.

### DMSP Compounds and Amino Acids are Strong Chemoattractants of TM1040.

[0132] A chemotaxis plate assay (DeLoney-Marino et al., 2003) was used to screen a large number of pure compounds thought to be in dinoflagellate cell homogenates for their ability to affect the chemotactic behavior of TM1040. This assay utilizes a minimal medium with 0.3% agar (BM glycerol motility agar) that allows the bacteria to swim through the agar matrix. Bacteria inoculated into the center of the agar consume nutrients and create a concentration gradient that increases outward from the point of inoculation. The bacteria sense the increasing gradient and swim outwards, seeking higher concentrations of nutrients, which is manifested as a symmetrical “motile” colony. If an attractant is placed at a short distance in front of the advancing motile colony, it forms a second gradient moving towards the oncoming cells that will affect the symmetry of the colony by reducing the net outward swimming of the bacteria. This is shown in FIG. 11. When inoculated in BM glycerol motility agar (FIG. 11A), TM1040 cells swim outward from the point of inoculation to form a colony that often contains one or two internal bands of cells. These bands have been associated with subpopulations of bacteria that are responding to different attractants (Wolfe et al., 1989).

[0133] As measured by this method, TM1040 is chemotactically responsive to a number of different chemicals, most notably DMSP and its catabolites, as well as amino acids. For example, addition of DMSP (FIG. 11B) caused a marked deformation in the periphery of the motile colony, highlighted by flare of bacteria and disruption of the outer ring. Responses to methionine (FIG. 11C) and valine (FIG. 11D) also had significant effects on the periphery of the motile colony. In comparison, there was no detectable change in the appearance of the motile colony when either arabinose (FIG. 11E) or fructose (FIG. 11F) was tested, suggesting that these two sugars do not affect TM1040 chemotaxis.

[0134] The response to other chemicals was scored on a plus-minus scale. TM1040 is attracted to all amino acids, similar to the response observed with methionine or valine. The bacterium responded strongly to the DMSP metabolites, acrylate and MMPA, while only weakly to MPA. These responses were similar to that of methionine and valine. Of the 12 sugars that were tested, TM1040 responded positively to (in order of response) sucrose, N-acetylglucosamine (NAG), galactose, glucose, and maltose. The tricarboxylic acid cycle (TCA) intermediates, citrate and fumarate, also elicited a strong positive response from TM1040, while only a mild response to succinate and no response to α-ketoglutarate was seen as shown in Table 3.

TABLE 3
Change in motile colony morphology of TM1040 in
response to attractants, compared to the control

| | |
|---|---|
| Attractant(s) | Response^{a} |

Amino acids

| | |
|---|---|
| Alanine, arginine, asparagine, aspartic acid, glutamic acid, | ++ |
| methionine, phenylalanine, proline, threonine, valine | |
| Glycine, histidine, cysteine, isoleucine, leucine, lysine, serine, | + |
| tryptophan, tyrosine | |

DMSP metabolite(s)

| | |
|---|---|
| DMSP, acrylate, MMPA | ++ |
| MPA | + |
| DMSO | − |

Sugars

| | |
|---|---|
| Galactose, N-acetylglucosamine, sucrose | ++ |
| Glucose, maltose, glycerol | + |
| Lactose, arabinose, fructose, fucose, mannose, ribose, xylose | − |

TCA Intermediate(s)

| | |
|---|---|
| Citrate, fumurate | ++ |
| Succinate | + |
| Alpha-ketoglutarate | − |

^{a}The strength of the response indicates the change in motile colony morphology when a chemical is spotted near the colony periphery compared to the control, no spotted chemical.

[0135] As described, BM glycerol medium was used because TM1040 can utilize glycerol as a sole carbon source, as has been observed for other roseobacters (Shiba 1991). However, it is known that chemotaxis behavior in other bacterial species can be affected by the availability of background nutrients. Indeed, when glucose was used in place of glycerol as the sole background carbon source, TM1040 chemotaxis was severely affected, and many of the chemicals that were attractants using BM glycerol failed to produce an effect in BM glucose as shown in Table 4. The two exceptions were acrylate and succinate, which both produced a moderate response in the glucose background.

TABLE 4
Change in motile colony morphology of TM1040 in
response to putative attractants when grown in
BM motility agar with different carbon sources

| | Change in morphology with carbon source^{a} | | | |
|---|---|---|---|---|
| Chemical | Glycerol | Glucose | Succinate | Alanine |
| Acrylate | ++ | + | ++ | + |
| Alanine | ++ | − | + | − |
| Alpha-ketoglutarate | − | − | + | − |
| DMSO | − | − | − | − |
| DMSP | ++ | − | + | + |
| Galactose | ++ | − | + | − |
| Glucose | + | − | + | + |
| Glutamic Acid | ++ | − | + | − |
| Lactose | − | − | − | − |
| Lysine | + | − | − | − |
| Maltose | + | − | ++ | ++ |
| N-acetylglucosamine | ++ | − | + | + |
| Succinate | + | + | − | ++ |
| Valine | ++ | − | + | + |

^{a}TM1040 was inoculated into the center of a BM motility agar plate containing a single carbon source (glycerol, glucose, succinate or alanine) and allowed to grow and move outwards. Chemicals were then spotted near the periphery of the motile colony, and the change in colony appearance compared to the control (no spotted chemical) was recorded on a plus/minus scale.

[0136] In contrast to glucose, when either succinate or alanine was used as the sole carbon source, TM1040 chemotactic behavior was similar to what had been observed in BM glycerol medium, albeit the response was often less intense. Not surprisingly, since chemotaxis relies on the establishment of chemical gradients, TM1040 did not respond to any chemical when the same chemical was incorporated into the BM motility medium.

### Quantitative Chemotaxis Toward Pure Compounds.

[0137] The results of the chemotaxis screening assay were used to select a subset of chemicals for further testing, using a quantitative capillary assay. As the data in FIG. 12 show, the response of TM1040 to a given attractant is concentration dependent, e.g., concentrations below 2 μM failed to elicit a significant response, while a 200 μM concentration of an attractant produce strong chemotaxis (FIG. 12A). Among the amino acids tested, methionine and valine gave the strongest response factors (means of 9.8 and 6.1, respectively), while lysine and glycine produced a similar response (mean, ca. 3.5) from TM1040. TM1040 also showed strong chemotaxis toward DMSP, which produced a response factor of 8.2 (FIG. 12B). The only breakdown product of DMSP that is a significant chemoattractant for TM1040 is MMPA (mean response factor of 3.8). In comparison, all the sugars tested produced only a weak to mild chemotactic response from TM1040 (means of <3 [FIG. 12C]). Of these sugars, TM1040 was most attracted to glucose, producing a mean response factor of 2.1. FIG. 12 also shows the response of TM1040 to TCA intermediates. Of the three TCA intermediates that were tested (succinate, α-ketoglutarate, and citrate), none were found to be significant chemoattractants for TM1040, suggesting that these chemicals play a minor role in the overall response of TM1040 toward dinoflagellates. Overall, the results from the capillary assay agree with the data obtained from the qualitative assay using BM motility agar.

Chemotaxis Toward P. piscicida Homogenates is Inhibited by Externally Supplied Attractants.

[0138] As was noted in the data presented in Table 4, in the presence of an externally supplied attractant distributed homogeneously throughout the medium, chemotaxis toward a point source of the same attractant is inhibited because the gradient is deflated.

[0139] Using this knowledge, experiments were designed to identify the heat-labile attractants found in the dinoflagellate homogenates. As shown in Table 5 and in accord with the data in FIG. 10, the response of TM1040 to untreated dinoflagellate homogenate in the absence of any externally supplied attractant was greater than its response when the homogenate was preheated to 80° C. This relationship was altered, however, when DMSP, methionine, or valine was supplied externally in the buffer. In these cases, the mean number of bacteria in the untreated capillaries was 3.33×10⁴, 3.03×10⁴, or 1.53×10⁴ CFU per ml, giving a reduction in chemotaxis of 54, 58, or 78%, respectively (Table 5). An externally added attractant also reduced TM1040 chemotaxis to heated homogenates, with external valine producing the greatest reduction (74%), followed by methionine (48%) and DMSP (11%).

TABLE 5
Reduction in chemotaxis of TM1040 toward untreated and heated P. piscicida
homogenates by external addition of known attractants

| | No. of bacteria per capillary (CFU · 10⁴)^{b} with: | | | | | | |
|---|---|---|---|---|---|---|---|
| | | Attractant added to external buffer^{c} | | | | | |
| Treatment^{a} | Control^{d} | DMSP | % Reduction^{e} | Methionine | % Reduction | Valine | % Reduction |
| None | 7.24 (±1.39) | 3.33 (±0.15) | 54.01 | 3.03 (±0.32) | 58.15 | 1.53 (±0.15) | 78.87 |
| Heat | 3.51 (±0.35) | 3.10 (±0.16) | 11.68 | 1.80 (±0.11) | 48.72 | 0.91 (±0.24) | 74.07 |

^{a}Chemotaxis of TM1040 toward heated (80° C. for 15 min) or untreated P. piscicida homogenates was measured using the capillary assay (see Materials and Methods).
^{b}Standard deviation is given in parentheses.
^{c}Prior to the assay, DMSP, methionine, or valine was added to external buffer containing motile cells of TM1040 at a final concentration of 200 μM and mixed to homogeneity.
^{d}The control was buffer only.
^{e}% Reduction, the percent reduction in CFU per capillary compared to the control.

DMSP in P. piscicida Homogenates is Destroyed by Heating.

[0140] These results suggest that while DMSP is an attractant in untreated homogenates, its attractant quality is reduced upon heating, possibly due to degradation of the molecule. Destruction of 200 μM DMSP in CB was assessed after heating the samples to either 80 or 100° C. for 15 min. At both temperatures, negligible (<2%) loss of DMSP was observed. These results indicate that pure DMSP is not a heat-labile molecule.

[0141] An alternative explanation for why heat reduced the chemoattractant quality of the homogenates is that heat acts indirectly through an intermediate to inactivate DMSP. This hypothesis predicts that the concentration of DMSP decreases when a homogenate is heated. The DMSP concentration in untreated and heated homogenates was measured. In untreated P. piscicida homogenates the mean concentration of DMSP was 8.21±1.2 μM. After the homogenate was heated, the concentration of DMSP fell below the level of detectability (<1 μM). These data indicate that heat-activated components of P. piscicida homogenates enhance the degradation of DMSP and may explain the reduction in chemotaxis of TM1040 toward heated homogenates.

### Example 3

[0142] The results of the present study show that Silicibacter sp. strain TM1040, originally isolated from P. piscicida dinoflagellate cultures, senses and responds chemotactically to compounds produced by the dinoflagellate cells. Thus, this represents the first report of chemotaxis behavior of a Roseobacter clade bacterial species. Since Roseobacter species are prevalent in marine environments and abundant within blooms of DMSP-producing phytoplankton, chemotaxis to DMSP by these bacteria is likely to be an important mechanism in establishing close interactions with the dinoflagellate at both the physical and physiological levels.

[0143] Many physiological characteristics of the Roseobacter clade of bacteria, such as Silicibacter sp. strain TM1040, make them well suited for life in close proximity to dinoflagellates and algal cells. The area immediately surrounding a dinoflagellate is a habitable niche for some marine bacteria, it is not surprising to find that a dinoflagellate-associated bacterium like TM1040 has mechanisms to exploit this niche. At present, these mechanisms include swimming motility and the chemotactic response of the cells to DMSP and other dinoflagellate molecules, as well as the enzymatic mechanisms to degrade and utilize DMSP. These physiological functions enhance the survival of these bacteria when associated with a dinoflagellate cell. Interestingly, a preliminary analysis of the genome of Silicibacter sp. strain TM1040 reveals several genetic loci that may serve to enhance the interaction of this bacterium with its dinoflagellate host.

[0144] Specifically, an analysis of the TM1040 genome revealed the presence of a complete complement of genes homologous to Agrobacterium tumefaciens vir genes whose function is involved in the transfer of DNA from the bacterium to plant cells. Thus, this discovery may allow the use of Silicibacter sp. TM1040 as a tool to deliver genes to marine algal species.

[0145] Strain TM1040 enhances the growth of P. piscicida through an unknown mechanism, but close physical interaction appears to be essential for the enhancement of dinoflagellate growth. As shown above, Silicibacter sp. TM1040 metabolizes the dinoflagellate secondary metabolite dimethylsulfoniopropionate (DMSP) and is chemotactically responsive to DMSP and other P. piscicida molecules. It is important to emphasize at this point that Silicibacter sp. TM1040 is the only member of the Roseobacter clade of bacteria that is known to form such a tight interaction with an algal species. An analysis of the genomic sequence of Silicibacter sp. TM1040, available at http://genome.jqi-psf.org/draft_microbes/siltm/siltm.home.html, http://img.jgi.doe.gov/v1.0/main.cqi?page=scaffolds&taxon_oid=400820000 or http://www.ncbi.nlm.nih.gov/entrez/guery.fcgi?db=Nucleotide&cmd=Search&term=AAFG01000001: AAFG01000020[PACC], the contents of which is hereby incorporated by reference herein for all purposes, indicates that the bacterium possesses a set of genes with strong homology to the Agrobacterium tumefaciens vir genes as shown in FIG. 13, which encode a cell-cell contact-mediated Type IV Secretory System (T4SS) and that are required for the transfer of A. tumefaciens T-DNA to plant cells (Christie et al., 2004 and 2001) (FIG. 14). Significantly, each of these genes is identical or nearly identical to homologs previously characterized on a plasmid, pSD25, isolated from another marine roseobacter referred to as Ruegeria isolate PR1b (Zhong et al., 2003). This is important because it was recently determined that Silicibacter sp. TM1040 harbors two plasmids (personal communication). Although the nature of those plasmids has not been fully disclosed, it is likely that the vir genes of TM1040 are also plasmid-borne. The first group consists of genes with homology to virD2 and virD4 (FIG. 14 and Table 6) which encode for the relaxase and coupling proteins providing the energetics for export of transfer DNA (T-DNA) (Cascales et al., 2004). The second group of 10 genes are homologous to A. tumefaciens virB1-2 B6 and virB8-B11 (Hapfelmeier et al., 2000). VirB7 is not present in the genome of Silicibacter sp. TM1040 and is considered a non-essential gene of Agrobacterium. The VirB proteins are responsible for producing the inner membrane channel and pilus structure (Cascales et al. 2004). In summary, all of the genes required to produce a functional cell-cell contact-mediated T4SS are present in the TM1040 genome. A BLAST search of the S. pomeroyii or Janasschia sp. CCS1 genomes using the VirD4 protein sequence from Silicibacter sp. TM1040, the most evolutionarily conserved component among type IV secretion systems, suggests that a T4SS is not present in these other Roseobacter species. As neither S. pomeroyi nor Jannaschia sp. CSS-1 form obligate interactions with algal species, the absence of vir genes in those species suggests that possession of the Vir homologs by Silicibacter sp. TM1040 represents a unique characteristic of the bacterium that is important for its interactions with algal hosts. Moreover, the strong homology between Silicibacter sp. TM1040 Vir proteins and their A. tumefaciens counterparts suggests that they potentially function to promote genetic exchange between strain TM1040 and its algal host cells (both micro- and macroalgal species).

[0146] The practical application of the knowledge of Silicibacter sp. TM1040 vir genes and T4SS lies in the potential to use the bacterium to genetically modify marine algae, both microalgal species (dinoflagellates, diatoms, and unicellular algae), as well as macro-algal species (commonly ‘seaweeds’). Marine algal species are widely used in businesses that include agriculture, cosmetics, food, pharmaceutical, and biotechnology companies. Marine algal species are used commercially to produce gelling agents (agar, alginate, carrageenan), cosmetics, pigments, and find applications in the food and beverage industries, and as pharmaceutical compounds (antimicrobial, anti-inflammatory, antitumoral, and antiviral). They are also finding application in the emergent neutraceutical (particularly in the production of anti-oxidants), botanicals and phytopharmaceutical industries.

[0147] Thus, a partial list of potential uses of Silicibacter sp. TM1040-mediated gene transfer includes the following applications:

1. Modify carotenoid-producing algae, i.e., Dunaliella salina, to over-produce beta-carotene.
2. Genetically engineer microalgal species to produce select essential omega-3 or omega-6 fatty acids, such as docosahexaenoic acid (DHA) or arachidonic acid (ARA), currently produced from a dinoflagellate (Crypthecodinium cohnii) and microalga (Schizochytrium sp.)
3. Alter the properties of nori (Porphyra sp.) or other edible macroalgae to enhance or modify coloration, texture, agar content, etc.
4. Modify the properties of carrageenan and agar from red seaweeds and alginic acid from brown seaweeds.
5. Genetically engineer marine algal to produce foreign proteins or compounds of interest to the pharmaceutical or chemical industries.
6. Enhance heavy-metal-binding properties of macroalgal for purposes of improved bioremediation of copper and other metal pollutants.

### Example 4

[0148] As discussed above, strain TM1040 is motile and swims towards dinoflagellate-derived molecules, such as dimethylsulfoniopropionate and amino acids, by chemotaxis. In the present study, mutants defective in swimming motility were used to determine the importance of bacterial flagella and swimming motility in the interaction between Silicibacter sp. TM1040 and P. piscicida. Silicibacter sp. TM1040 is actively motile by means of three lophotrichous flagella and is chemotactic towards DMSP, MMPA, and amino acids.

### Materials and Methods

### Bacteria and Media.

[0149] Silicibacter sp. TM1040 was grown in HIASW broth consisting of 25 g Difco Heart Infusion broth (Becton-Dickinson, Franklin Lakes, N.J.) supplemented with 10 g of artificial seasalts per liter (Instant Ocean, Aquarium Systems, Mentor, Ohio) or in halfstrength 2216 marine broth (Becton-Dickinson) as described by Alavi et al 2001. Marine motility agar was made by supplementing half-strength 2216 marine broth with 3.0 g of Bacto-agar per liter. Basal minimal (BM) broth containing glycerol as the sole carbon source was made according to the description described herein above. Escherichia coli DH5á \tilde{e} pir was grown in Luria-Bertani (LB) broth. Bacto-agar at 1.5% (w/v) was added to broths as required. As appropriate, kanamycin was used at 120 μg per ml for Silicibacter strains and 50 μg per ml for E. coli Dinoflagellates and cultivation.

[0150] P. piscicida CCMP1830 was grown as previously described in Example 2. Dinoflagellates were fed a diet of axenic Rhodomonas sp. CCMP768, using the method described by Alavi et al. 2001. All dinoflagellate culture manipulations were done in a laminar flow hood.

### Transposon Mutagenesis and Phenotypic Analyses.

[0151] Electrocompetent Silicibacter sp. TM1040 was prepared following the procedures of Garg with minor changes (Garg et al, 1999). Strain TM1040 was incubated in HIASW broth at 30° C. with shaking to an optical density at 600 nm (O.D.600) of 0.5. The cells were harvested by centrifugation at 8000×g for 10 min at 4° C., the supernatant was discarded, and the cell pellet washed four times in ice-cold distilled water. Following the final wash, the cell pellet was suspended in 10% glycerol and held on ice. A 50 μl aliquot of cells was mixed with 1 μl (25 ng) of the EZ::TN <R6Kãori/KAN-2> transposome (Epicentre, Madison, Wis.), and the mixture was electroporated at 16 kV per cm, yielding a time constant of ˜9.2 ms. The cells were suspended in 2 ml of pre-warmed HIASW broth and incubated 14-16 h at 30° C. with shaking. Samples of this culture were then spread onto HIASW agar containing kanamycin and incubated for 1-2 d at 30° C. The resulting kanamycin-resistant colonies were transferred to HIASW agar plus kanamycin and arranged in a 7-by-7 array to facilitate future analysis. Following incubation, the colonies were replicated on three media: fresh HIASW agar, marine motility agar to screen for motility defects, and BM plus glycerol to screen for auxotrophs. Motility (Mot−) mutants and auxotrophs were identified from the initial bank, picked to fresh media, and re-tested two more times to confirm the phenotype.

### Phenotypic Characterization of Mot-Mutants.

[0152] Mot-mutants were further analyzed for additional linked phenotypes. Since motility agar screening does not discriminate between defects in flagella or chemotaxis, each Mot-mutant was examined by phase-contrast microscopy for its ability to swim in HIASW, BM plus glycerol, and half-strength marine broths. The synthesis of flagella was determined using the flagellar silver staining protocol of West et al. (West et al., 1977). The length of individual cells was measured by analysis of phase-contrast images captured using a Quantix CCD camera (Photometrics, Tucson, Ariz.) and IPLab computer software (Scanalytics, Fairfax, Va.), with 5 μm beads (Ted Pella, Redding, Calif.) serving as a size reference. The ability of the mutants to form rosettes (groups of cells bound to each other at their cell poles, a characteristic of Silicibacter sp. TM1040 and other roseobacters (Ruger et al., 1992) was determined by light microscopic examination of cells grown in BM plus glycerol broth with shaking at 30° C. for 2 d. The growth rate of the Mot− mutants was determined by measuring the O.D.600 over a two-day period while incubating in HIASW broth at 30° C. with shaking.

### Cloning and Sequencing of EZ:TN Flanking DNA.

[0153] The EZ:TN transposon and flanking DNA were rescue-cloned by using the oriR6K origin of replication on the EZ:TN transposon. Genomic DNA from each Mot− mutant was extracted using phenol-chloroform extraction plus CTAB (cetyltrimethyl ammonium bromide) following standard protocols (Ausubel, F. M. 2001). Genomic DNA was digested with NcoI restriction endonuclease and treated with T4 DNA ligase to circularize the molecules. This was then transformed into E. coli DH5á ëpir by electroporation. The transformed cells were spread onto LB containing kanamycin and incubated at 37° C. overnight. Plasmid DNA was extracted from the resulting kanamycin-resistant colonies using a Qiagen Midi kit (Qiagen, Valencia, Calif.) according to the manufacturer's instructions. The nucleotide sequence of the DNA flanking the transposon of a representative plasmid from each rescue-cloning was obtained using two oligonucleotide primers, KAN-2 FP-1 and R6KAN-2 RP-1, as described by the manufacturer (Epicentre).

### Analysis of Transposon Insertion Site.

[0154] The site of transposon insertion in the genome of Silicibacter sp. TM1040 was determined through DNA:DNA homology searches using the DNA sequence flanking each transposon and the draft annotation of the Silicibacter sp. TM1040 genome provided by the Joint Genome Institute (JGI), U.S. Department of Energy (Walnut Creek, Calif.; http://genome.ornl.gov/microbial/rose_tm1040/). The genome sequence is deposited in GenBank (Bethesda, Md.) under accession number NZ_AAFG00000000. Nucleotide sequences flanking the transposon were aligned with the draft TM1040 genome sequence using BLASTN to identify the mutated gene (Altschul et al., 1990). Open reading frames (ORFs) were identified using the GeneMark program (Lukashin et al., 1998) and a BLASTP alignment of the deduced amino acid sequence. Further characterization of the putative gene products was made through a search for protein family domains using the Simple Modular Architecture Research Tool (SMART 4.0) (Letunic et al., 2004).

### Fluorescent Staining of Living Bacteria.

[0155] Silicibacter strains were stained with 5-(and 6-) carboxyfluorescein diacetate succinimidyl ester (CFDA/SE, Molecular Probes, Eugene, Oreg.) fluorescent tracer dye according to the method of Fuller et al., 2000. A 5 ml aliquot of half-strength marine broth was inoculated with either one of three Mot-mutants or the wild-type cells, taking as an inoculum cells growing at the periphery of a 2-day-old colony grown in marine motility agar. After overnight incubation at 30° C., the cells were pelleted by centrifugation at 4,000×g for 10 min. at room temperature, and suspended in 10 parts per thousand (ppt) artificial seawater (ASW; Instant Ocean) containing 1 mM succinate to an O.D.600 of 0.6. A 10 μl aliquot of 4 mM CFDA/SE tracer dye dissolved in DMSO was added to 1 ml of cells and the tubes inverted several times to mix. After 4 h staining in the dark, the cells were washed 3× with 10 ppt ASW at 8000×g for 10 min to remove unbound stain. After staining and prior to the final washing step a sample of stained wild-type cells was killed by heating at 65° C. for 10 min.

Measurement of Attachment of Silicibacter sp. TM1040 to P. piscicida.

[0156] Dinoflagellates were prepared by behavioral washing using the method described by Alavi et al 2001 with the following modifications. A 10 ml aliquot of P. piscicida culture at ˜105 cells per ml was added to a 14 ml polypropylene test tube (Falcon #352059) and allowed to remain undisturbed for 30 min. During this time dinoflagellates actively swim to the bottom of the container. 1 ml of the turbid bottom layer containing the dinoflagellate zoospores was carefully removed from the tube and added to 10 ml of sterile 10 ppt ASW in a separate tube. This process was repeated three more times, removing the majority of the unattached or free-living bacteria from the dinoflagellates. The washed dinoflagellates (1 ml sample) were added to 1 ml of 10 ppt ASW contained in a well of a tissue culture plate (Falcon 353046, Becton Dickson). Samples of mutant, wildtype and heat-killed TM1040 cells stained with CFDA/SE were diluted in 10 ppt ASW to ca. 105 cells per ml and 20 μl of each dilution was added to 2 ml of the washed zoospores. After 2 h, 1 ml of each suspension was fixed with 2.5% paraformaldehyde (w/v final concentration) on ice for 15 min. The fixed cells were pelleted by centrifugation at 8,000×g for 10 min. at 4° C. and suspended in 100 μl of 10 ppt ASW. Fifty μl of the cells was placed on a clean glass slide and the cells allowed to adhere to the glass. After 10 min, excess fluid was removed and the cells were covered with 10 μl of Prolong anti-fade solution (Molecular Probes, Eugene, Oreg.) and a glass cover slip. The number of CFDA/SE-stained bacteria associated with individual P. piscicida zoospores was determined using confocal scanning laser microscopy (CSLM) and epifluorescence.

### Confocal Scanning Laser Microscopy.

[0157] Dinoflagellates and physically associated CFDA/SE stained Silicibacter strains were visualized with a Bio-Rad Radiance 2100 AGR-3Q laser scanning confocal microscope with argon, green He/Ne and red diode lasers (Biorad, Hercules, Calif.), with an excitation wavelength of 488 nm and detected using a 500-535 nm band pass filter. Optical Z-sections at 0.5 μm increments were obtained and composite images assembled as previously described (Alavi et al., 2001).

### Epifluorescence Microscopy.

[0158] CFDA/SE-stained samples were also visualized using an Olympus BX60 upright microscope equipped with filter cubes giving excitation and emission maxima of 480 and 525 nm, respectively (Chroma, Rockingham, Va.). Phase contrast and fluorescent images were captured and phase-contrast and epifluorescent micrographs of the same field merged using ImageJ software (Rasbad, NIH, MD) with the co-localization plug-in (Bourdoncle, Institut Jacques Monod, Paris).

### Bacterial Add-Back Experiments.

[0159] Axenic zoospores were produced using the method of Alavi et al., 2001, which typically produced between 1,000-2,000 axenic zoospores per 10 ml culture. Axenic zoospore cultures were fed Rhodomonas sp. algae at a ratio of dinoflagellate to alga of 1:800, a ratio empirically determined to provide maximal growth of P. piscicida under these conditions. Silicibacter sp. TM1040 and Mot− mutant strains were incubated in HIASW broth overnight at 30° C. with shaking and washed twice in 10 ppt ASW. Each culture was normalized to an O.D.600 of 0.2 and placed on ice prior to use. A sample of wild-type strain TM1040 culture was heat-killed at 65° C. for 10 min to serve as a negative control. A 50 μl sample of each bacterial suspension was added to 10 ml of the axenic zoospores with gentle mixing to give ca.104 bacteria per ml. Cultures were incubated at 20° C. on a 14:10 light:dark cycle for 9 d. A sample of each culture was taken on days 1, 3, 5, 7 and 9 for enumeration of dinoflagellate and prey algal cell densities, and samples taken on days 1 and 9 for the analysis of bacterial species by denaturing gradient gel electrophoresis (DGGE).

### Cell Counts.

[0160] P. piscicida and Rhodomonas sp. were fixed in 10% (v/v) Bouin's fixative (Sigma, St. Louis, Mo.), diluted in 10 ppt ASW (as required), and counted using a hemacytometer (Corning).

### Denaturing Gradient Gel Electrophoresis (DGGE).

[0161] DGGE was used to determine the composition of the bacterial species during add-back experiments. PCR amplification of 16SrDNA was done according to the method of Ferris et al., 1996, and the products analyzed by DGGE according to Wang et al (2005). The oligonucleotide primers used to amplify the 16S rDNA gene specific for most eubacteria were 1055f (ATGGCTGTCGTCAGCT) (SEQ ID NO. 15) and 1392rGC (CGCCCGCCGCGCCCCGCGCCCGGCCC-GCCGCCCCCGCCCCACGGGCGGTGTGTAC) (SEQ ID NO. 16) containing a GC-clamp.

### Results

[0162] Visualization and localization of Silicibacter sp. TM1040 on dinoflagellate cells.

[0163] The interaction of Silicibacter sp. TM1040 with P. piscicida was measured by microscopic imaging of live motile bacteria that had been stained with a fluorescent dye (CFDA/SE). Fluorescent and phase-contrast images of the identical microscope field containing dinoflagellate zoospores and bacteria were superimposed and analyzed by computer image analysis software to localize the bacteria on the dinoflagellate. FIG. 15 shows a representative set of images from this analysis. A single zoospore is shown in FIG. 15A, and several labeled bacteria are visible in panel B. When the two images are superimposed the location of the bacteria relative to the dinoflagellate cell is revealed (FIG. 15C). As shown in FIG. 15C, this analysis indicates that the interaction of Silicibacter sp. TM1040 with P. piscicida results in the bacteria being in close physical association with the dinoflagellate. Bacteria were often observed on the dinoflagellate periphery, but they were also found at sites either within or on top of the zoospore, although it was not possible to distinguish between these two possibilities by this method. These data show that Silicibacter sp. TM1040 forms a close physical interaction with P. piscicida, where they appears to attach to the surface of the dinoflagellate, and shows that the bacteria may also find their way to locations beneath the surface of the dinoflagellate cell or in deep grooves on the outer surface of the host cell.

[0164] To obtain a more precise location of Silicibacter sp. TM1040 cells when they interact with the dinoflagellate, a series of Z-section optical images using confocal scanning laser microscopy (CSLM) were obtained. The optical sections were combined into a composite image in which the objects were color-coded based on their Z-axis distance (depth). FIG. 16 shows a representative image from this analysis. In these images, green pixels represent objects that are close to the proximal side of the dinoflagellate cell surface, blue tints denote objects on the distal side of the dinoflagellate, and a pink or red color is used for objects in the center of the zoospore. Bacteria were found on the periphery of the dinoflagellate (as observed in FIG. 15), but were also frequently observed at sites that co-localize to areas beneath the surface of the dinoflagellate. For example, in FIG. 16, at least five bacteria are visible in the Z-axis center of the epitheca (or upper hemisphere) of the dinoflagellate cell, and one bacterium is seen beneath the surface of the hypotheca or lower hemisphere of the P. piscicida zoospore. Results of a computer image analysis of these images indicate that these cells co-localize within optical sections scanned between 5-10 μm below the dinoflagellate surface, and support the hypothesis that motile Silicibacter sp. TM1040 cells form an intimate association with P. piscicida.

Random mutagenesis of Silicibacter sp. TM1040.

[0165] Silicibacter sp. TM1040 is chemotactic toward P. piscicida cells as described above, indicating that bacterial motility is important for the initiation or formation of its interaction with P. piscicida. To verify this indication mutants of Silicibacter sp. TM1040 were constructed that were defective in wild-type motility. A technique was developed that permitted random mutations to be constructed using a Tn5 derivative (the EZ::TN <R6Kãori/KAN-2> transposome). The method is highly effective and has a mutation efficiency of ca. 1.5×10⁻⁴ kanamycin-resistant colonies per electroporation (data not shown). Using this method of transposon insertional mutagenesis, a bank of 3,724 kanamycin-resistant Silicibacter sp. TM1040 mutants was constructed. The mutants were screened for loss of motility and auxotrophy. Twenty eight non-motile (Mot−) mutants, i.e., cells that had non-wild-type swimming, including non-motile cells as well as cells that were motile, albeit with extreme impairment of flagellar function, were identified. By comparison, 6 independent auxotrophs were obtained from the bank. Further tests reduced the number of (Mot−) mutants to nine, of which three, TM2014, TM2017, and TM2038, were chosen for further analysis.

Phenotypic Analysis of Silicibacter sp. TM1040 Motility Mutants.

[0166] Two of the three strains, TM2014 and TM2017, are non-motile (Mot−) in marine motility agar (FIG. 17) and do not swim in liquid media. Neither of the two mutants produces flagella, as measured by a silver staining method (FIG. 18). Both are capable of forming rosettes, star-shaped clusters of cells typical of this species, and their growth rates and cell size are indistinguishable from wild-type (FIG. 19 and Table 7). Conversely, strain TM2038 is non-motile when examined within 24-48 h post inoculation, but produces small flares of motile cells in semi-solid marine motility agar upon prolonged incubation (FIG. 17). In liquid media, the majority (>99.9%) of the cells were nonmotile.

[0167] Silver staining of flagella confirmed that a few TM2038 cells produced flagella (FIG. 18). These data indicate that the mutation in TM2038 leads to a severe down-regulation of flagellar synthesis. Interestingly, the mutation also resulted in an increase in the length of TM2038 cells (FIG. 19). The mean length of a TM2038 cell is 6.9 μm or nearly four times the length (1.5 μm) of the parent cell, Silicibacter sp. TM1040 (Table 7). Taken together, these results suggest that the mutation in TM2038 has likely affected a regulatory circuit that controls flagellar synthesis and cell elongation.

### Genomic Analysis of the Mutations Leading to Motility Defects.

[0168] The transposon and flanking DNA sequences from strains TM2014, TM2017, and TM2038 were obtained by rescue cloning as described above. Following trimming of transposon nucleotide sequence, the DNA flanking the site of each insertion was used to search for DNA:DNA homology to the draft annotation of the genome of Silicibacter sp. TM1040 (http://genome.ornl.gov/microbial/rose_tm1040). Open reading frames (ORFs) were identified and the deduced amino acid sequence of these proteins was used in further searches with BLAST of sequences contained in GenBank and the draft annotation of another roseobacter species, Jannaschia sp. CCS1 (http://genome.ornl.gov/microbial/jann/). These data were used to establish the degree of homology between the mutated ORFs and known proteins in the databases. The results of this analysis are shown in FIG. 20. The Mot− mutant TM2014 has a mutation in a gene (GenBank accession number ZP_{—}003388108.1; JGI contig 52, ORF1857, and gene ID #402609350) that hereafter will be referred to as flaA. The flaA ORF has negligible homology to protein sequences from non-roseobacter genera, but reasonably good homology to ORFs of unknown function from both Silicibacter pomeroyi DSS-3 (GenBank accession number AAV93530.1; E=3.0 e-76 and 27% identities) and Jannaschia sp. CCS1 (JGI contig 27, ORF2948; E=8e-25 and 24% identities). This suggests that flaA may have a roseobacter specific function.

[0169] While flaA protein:protein searches failed to suggest a function for this ORF, an analysis of the ORFs adjacent to flaA was enlightening. flaA is the last gene in a group of five genes each aligned in the same transcriptional orientation, suggesting that flaA may be part of an operon. Two of the five genes in this operon have homology to genes encoding proteins known to be involved in flagellar biosynthesis or energetics. For example, flaA is downstream of the predicted stop codon for a gene encoding a protein that is homologous to Caulobacter crescentus motA (E=2.0 e-87, 55% identities). In addition, downstream of flaA and separate from it by a 335 bp gap is the start codon of a gene with nearly perfect homology to flhA from Rhodobacter sphaeroides (E=0.0, 65% identities) whose function is involved in flagellar protein export. Homologs to fliR and flhB, other genes encoding proteins required for flagellar export, are located downstream to the flhA homolog; further strengthening the belief that flaA encodes a protein involved in flagellar biosynthesis or export. The mutation in strain TM2017 (FIG. 20), the second Mot− mutant, is in an ORF (GenBank accession ZP_{—}00339586.1; JGI contig 56, ORF3662; gene ID #402627660) that has homology to many sensor histidine kinases, with significant homology to R. capsulatus CckA (E=1e-162, 58% identities). The Silicibacter sp. TM1040 CckA homolog is the last gene in a group of four ORFs each transcribed in the same direction (right to left, as shown in FIG. 20). The other genes in this locus encode proteins with homology to R. sphaeroides Fmu (Sun family of 16S rRNA cytosine methyltransferase), R. sphaeroides ferrodoxin, and L-carnitine dehydratase from Cupriavidus necator (formerly Ralstonia eutropha JMP134).

[0170] The mutation that produced strain TM2038 is in an ORF (GenBank accession ZP_{—}00339421.1; JGI contig 56, ORF 3516; gene id 402626200) with homology to the response regulator protein, CtrA (FIG. 6) of R. capsulatus (E=1.0 e-116, 89% identity). CtrA, a DNA binding protein, acts in concert with CckA as a two-component regulatory circuit (Hoch et al., 1995) to regulate motility and genetic exchange in R. capsulatus (Lang et al., 2002) and the cell cycle of C. crescentus (Jacobs et al., 2003), perhaps offering clues as to the homologous gene functions in Silicibacter sp. TM1040.

### Defects in Bacterial Motility Adversely Affect the Physical Interaction.

[0171] The Mot-mutants were compared to the wild-type parent for their ability to physically interact with P. piscicida zoospores by analyzing CSLM composite images of fluorescently-tagged bacteria. FIG. 21 shows a representative set of these composite images. When compared to the wild-type bacteria (FIG. 21A), micrographs of the three Mot− strains (FIGS. 21B-D) showed fewer bacteria colocalized to areas beneath the zoospore surface (or interior portions of the dinoflagellates). For example, images of the flaA and ctrA mutant, FIGS. 21B and C respectively, lack fluorescently stained bacterial cells that co-localize with cytoplasmic regions of the zoospore (red or pink colors), yet the presence of bacteria on the periphery (green or blue color) of the dinoflagellate is readily apparent. The lack of bacteria that co-localized to regions beneath the surface or interior of the dinoflagellate was also evident with TM2038 (the ctrA mutant), which also appeared to have reduced ability to attach to the surface of the zoospore (FIG. 21D). A quantitative measurement of the number of bacterial cells either co-localized to the surface or interior regions of the zoospore (FIG. 22) supports the CSLM images. Individual dinoflagellates harbored between 1 to 6 attached wild-type bacteria per dinoflagellate and from 0 to 6 intracellular wild-type bacteria per dinoflagellate. The mean of these values was set at 100% and used to compare the effect of the three mutations on the physical interaction with P. piscicida. The results, shown in FIG. 22, are consistent with the CSLM data: the Mot− strains are defective in their physical interaction with the zoospore. Both the flaA and cckA mutations have little effect on the attachment of these bacteria to the surface of the dinoflagellates (79.75% and 111.39% of wild type values, respectively), while the number of bacteria co-localized to the interior of the dinoflagellate was significantly reduced (16.13% and 38.71% of the wild-type value, respectively) in these two mutants. The ctrA mutant (TM2038) failed to localize to either the surface (31.65% of wild type) or the interior (38.71% of wild type) of the zoospore at the same level as the wild-type cells. The attachment of heat-killed Silicibacter sp. TM1040 cells was reduced to 54.43%, but this value was not statistically different from the wild-type.

[0172] However, no heat-killed bacteria were found to co-localize with intracellular regions of the dinoflagellate. This suggests that attachment to the dinoflagellate surface is not dependent on a living cell, while attachment to structures beneath the zoospore surface requires a living cell with functioning flagella.

[0173] Not all zoospores harbor bacteria, therefore, the percent of dinoflagellates with bacteria either localized to the surface or interior of the zoospore was measured (FIG. 22B). The percentage of zoospores in the population that harbored surface-co-localized bacteria when incubated with wild-type Silicibacter sp. TM1040 was 56%, while 21% of the dinoflagellates were observed to have bacteria that co-localized to areas beneath the surface of the zoospore (FIG. 22B, first pair of bars). Neither the flaA, cckA or ctrA mutation affected the attachment of the mutant cells to the dinoflagellate surface, however these mutations had a statistically significant negative effect on finding the bacteria co-localized with the interior of the zoospore (FIG. 22B). Taken as a whole, these results underscore the requirement of bacterial motility in the interaction of Silicibacter sp. TM1040 with P. piscicida, and suggest that roseobacter motility may be important in allowing the bacteria to gain access to areas that appear to be beneath the surface of the zoospore.

Non-Motile Bacteria Adversely Affect the Growth of P. piscicida.

[0174] It is likely that bacterial motility may be important in the growth of that P. piscicida because of the interaction with a roseobacter, and this was tested using the mutant Silicibacter sp. TM1040 strains and axenic zoospores. Axenic P. piscicida zoospores were individually cultured in the presence of Silicibacter sp. TM1040 and each of the three Mot− mutants, added to a final concentration of 100 bacteria per ml of culture. As shown in FIG. 23A, in the presence of wild-type TM1040, dinoflagellate density reached 9.5×10³ cells per ml on day nine, compared to a zoospore density of 2.9×10³ cells per ml on day nine in the absence of bacteria. Dinoflagellate growth was reduced by ca. 30% when incubated with non-motile strains TM2014 (flaA) and TM2017 (cckA), but not affected by the presence of TM2038 (ctrA). With the increase in dinoflagellate cell density there was a concomitant reduction in Rhodomonas sp. prey algal cell density (FIG. 23B). In the presence of wild-type and the three mutant strains, prey algal densities decreased at a similar rate from ca. 1.7×10⁵ per ml on day one to ca. 9×10⁴ cells per ml on day five, followed by a dramatic decrease resulting in ca. 1.5×10³ cells per ml by day seven. Without the addition of bacteria or in the presence of heat-killed cells, prey algal densities decreased slowly from 1.7×10⁵ per ml on day one to 1.2×10⁵ cells per ml on day five and finally to 6×10⁴ per ml on day nine (FIG. 23B).

[0175] The bacterial species composition of the cultures was determined by DGGE (FIG. 24). The PCR primers used in this method amplify bacterial 16S rDNA as well as Rhodomonas sp. plastid DNA, serving as an internal positive control. A single DNA band corresponding to the Rhodomonas sp. plastid was present in the axenic P. piscicida culture on day one, indicating the lack of bacterial cells. Two DNA bands are found in all other cultures containing Silicibacter sp. TM1040 or mutant cells (FIG. 24, lower DNA band), Rhodomonas sp. algae (FIG. 24, upper DNA band), plus P. piscicida zoospores. The lack of additional 16S rDNA bands indicates that the cultures were populated solely by Silicibacter sp. TM1040 or one of the Mot− mutants. The loss of Rhodomonas sp. algae through consumption by the dinoflagellates can be observed in the samples from day nine. Together these data support the hypothesis that motility of Silicibacter sp. TM1040 plays a role in the physiological effects the bacteria have on promoting growth of P. piscicida.

[0176] A central component of this study was the construction of a library of Silicibacter sp. TM1040 random transposon insertion mutants that was subsequently screened to find those that exhibited defects in swimming motility. The successful use of transposon mutagenesis in Silicibacter sp. TM1040 represents a method that may be of value for the genetic manipulation of other Roseobacter clade species. The mutated gene in three of the Mot− strains was identified. All three mutations reveal interesting features of the molecular mechanism underlying flagellum biosynthesis and energetics in Silicibacter sp. TM1040. The data indicate that Silicibacter sp. TM1040 swimming motility is in part controlled by homologs of a two-component regulatory circuit including a sensor kinase, CckA, and response regulator, CtrA. Silicibacter sp. TM1040 CckA and CtrA proteins are nearly identical in amino acid sequence and conserved domains to the same proteins in other α-Proteobacteria, such as R. capsulatus, C. crescentus, and Sinorhizobium meliloti. There is ample evidence that CckA/CtrA regulate a variety of cellular functions, including motility, cell differentiation, and genetic exchange. For example, in R. capsulatus, CckA/CtrA regulate transcription of class II, class III, and class IV flagellar genes (Lang et al., 2002). The ctrA mutation resulted in cells that fail to divide normally, giving rise to an elongated cell phenotype that is very similar to the phenotype observed in C. crescentus ctrA strains (Reisenauer et al., 1999).

[0177] The third mutant, strain TM2014, harbors a transposon insertion in a novel flagellar gene, flaA, whose deduced amino acid sequence shares little homology with other non-roseobacter proteins.

[0178] Disruption of flaA results in a complete loss of motility and flagellar biosynthesis. Based on the phenotype and the proximity of flaA to ORFs homologous to flagellar type III secretion system export proteins (Macnab, R. M. 2004), FlaA may play a role in the biosynthesis of the flagellum, perhaps in the Silicibacter sp. TM1040 flagellar TTSS pathway.

[0179] Silicibacter sp. TM1040 interacts with P. piscicida through a mutualistic or symbiotic relationship, where both organisms benefit from the interaction. For the bacteria one significant benefit is the acquisition of nutrients from the dinoflagellate in the form of DMSP and amino acids. The bacteria use swimming motility and chemotaxis to move towards concentration gradients of nutrients produced by the swimming dinoflagellate. As the bacteria close in on their host, they are confronted with several options, including to swim along with the moving dinoflagellate, to find dinoflagellates that have settled and orbit around these non-motile hosts, or to come in close proximity to the zoospore whereupon the bacteria attach. The latter appears most feasible based on the data set forth herein. In this niche, the bacteria not only are bathe in the nutrients they require, but also may be in a safe-zone, free from ciliates and flagellate bacteriovores.

[0180] The benefit to the dinoflagellate is not nearly so obvious, although the data show that zoospore growth is improved by the presence of Silicibacter sp. TM1040. Bacteria may enhance the growth of algal species by several different mechanisms. In dinoflagellate species, bacteria are thought to remove the build up of toxic waste products, regenerate essential nutrients, or produce compounds necessary for dinoflagellate growth (Doucette, 1995). In the case of P. piscicida, whole algal cells are supplied as the food source. The consumption and digestion of these algal cells could result in the build up of excess carbon or other compounds in the culture that limit dinoflagellate growth. The bacteria may function to degrade those compounds as they accumulate. Silicibacter sp. TM1040 may be required by P. piscicida to achieve balanced growth. This is the basis for a number of symbiotic and/or syntrophic relationships among organisms in nature. In another α-Proteobacterium genus, Rhizobium, nitrogen is supplied to the plant host in return for carbon (Ausubel, 1982).

[0181] As noted hereinabove, Silicibacter sp. TM1040 is a culturable, genetically tractable member of the marine Roseobacter clade, originally isolated from a culture of the dinoflagellate Pfiesteria piscicida, which forms an intimate and obligate interaction with algae, itself originally obtained from the Chesapeake Bay in 1997 (1, 17). The bacterium is associated with, attaches to, and is physiologically required by its dinoflagellate host (2, 16-18). TM1040 is found associated with other dinoflagellates and algal cells in laboratory cultures, and is frequently found in water samples obtained from the Chesapeake Bay.

[0182] The results of several experiments as set forth herein show that extracts and/or cell-free filtrates obtained from culture supernatants of TM1040 have a potent antibacterial activity that is effective in killing several pathogenic bacteria.

[0183] The cultivation process comprises culturing Silicibacter sp. TM1040 under aerobic conditions, in either a static or shaking mode, in a nutrient medium containing one or more sources of carbon, nitrogen and optionally nutrient inorganic salts and/or trace elements, followed by isolation of the said compound and purification in a customary manner.

[0184] The nutrient medium preferably contains sources of carbon, nitrogen and nutrient inorganic salts, organic trace elements and optionally other trace elements. The carbon sources are, for example, starch, glucose, sucrose, dextrin, fructose, molasses, glycerol, lactose or galactose, preferably glucose. Amount of the carbon source added varies according to the kind of the carbon source, and usually 1 to 100 g, preferably 2 to 50 g per 1 liter medium.

[0185] The sources of nitrogen are, for example, soybean meal, peanut meal, yeast extract, beef extract, peptone, tryptone, malt extract, corn steep liquor, gelatin or casamino acids, preferably soybean meal and corn steep liquor. Amount of the nitrogen source added varies according to the kind of the nitrogen source, and usually 0.1 to 30 g, and preferably 1 to 10 g per 1 liter medium

[0186] As the organic trace nutrients, amino acids, vitamins, fatty acids, nucleic acids, those containing these substances such as peptone, casamino acid, yeast extract and soybean protein decomposition products are used. Amount of the special required substance used varies according to the kind of the substance, and usually ranges between 0.2 g to 200 g, and preferably 3 to 100 g per 1 liter medium.

[0187] The nutrient inorganic salts and trace elements are, for example, sodium hydrogen phosphate, potassium hydrogen phosphate, sodium chloride, cobalt chloride, calcium chloride, calcium carbonate, potassium nitrate, ammonium sulfate or magnesium sulfate, preferably cobalt chloride and calcium carbonate. Amount of inorganic acid varies according to the kind of the inorganic salt, and usually 0.001 to 10 g per 1 liter medium.

[0188] Cultivation of the culture is usually carried out at temperatures between 20-42° C. and in a medium having a pH from about 6.0 to about 8.0, and preferably, about 7.0 to about 8.0. Preferably, the medium is maintained at a pH and salinity value appropriate for growth of the Silicibacter sp. TM1040 bacteria, for about 50 to about 200 hours, under aerobic condition provided by shaking or aeration/agitation in order to obtain an optimal yield of the bacteria and antibacterial agent.

[0189] Finally, the antibacterial agent may be isolated and purified from the culture. Namely, microbial cells are separated from the culture by a conventional means such as centrifugation or filtration, and the cells or the medium are subjected to an extraction with a suitable solvent. As a solvent for the extraction, any substance in which the isolated agent is soluble can be used. For example, organic solvents such as acetone, chloroform, dichloromethane, hexane, cyclohexane, methanol, ethanol, isopropanol, benzene, carbon disulfide, diethyl ether etc., are used, and preferably chloroform, dichloromethane, acetone, methanol, ethanol or isopropanol is used. The purification can be carried out by conventional procedures such as absorption, elution, dissolving and the like, alone or preferably in combination.

[0190] The crude material can be further purified by using any of the following techniques: normal phase chromatography using alumina or silica gel as stationary phase and eluants such as ethyl acetate, chloroform, methanol or combinations thereof; reverse phase chromatography using reverse phase silica gel like dimethyloctadecylsilylsilica gel, also called RP-18, or dimethyloctylsilylsilica gel, also called RP-8; as stationary phase and eluants such as water, buffers such as phosphate, acetate, citrate (pH 2-8), and organic solvents such as methanol, acetonitrile, acetone, tetrahydrofuran or combinations of these solvents; gel permeation chromatography using resins such as SEPHADEX™ LH-20 (Pharmacia Chemical Industries, Sweden), TSKgel TOYOPEARL™ HW-40F (TosoHaas, Tosoh Corporation, Japan) in solvents such as methanol, chloroform, acetone, ethyl acetate or combinations of these solvents or SEPHADEX™ G-0 and G-25 in water; or counter-current chromatography using a biphasic eluant system made up of two or more solvents such as water, methanol, ethanol, isopropanol, n-propanol, tetrahydrofuran, acetone, acetonitrile, methylene chloride, chloroform, ethyl acetate, petroleum ether, benzene and toluene.

[0191] It is contemplated that the present invention may be practiced using either batch, fed-batch or continuous processes and that any known mode of fermentation would be suitable. A classical batch fermentation is a closed system where the composition of the medium is set at the beginning of the fermentation and not subjected to artificial alterations during the fermentation. Thus, at the beginning of the fermentation, the medium is inoculated with the desired organism or organisms and fermentation is permitted to occur adding nothing to the system. Typically, however, a batch fermentation is “batch” with respect to the addition of carbon source and attempts are often made at controlling factors such as pH and oxygen concentration. In batch systems the metabolite and biomass compositions of the system change constantly up to the time the fermentation is stopped. Within batch cultures, cells moderate through a static lag phase to a high growth log phase and finally to a stationary phase where growth rate is diminished or halted. If untreated, cells in the stationary phase will eventually die.

[0192] A variation on the standard batch system is the fed-batch system. Fed-batch fermentation processes are also suitable in the present invention and comprise a typical batch system with the exception that the substrate is added in increments as the fermentation progresses. Fed-batch systems are useful when catabolite repression is apt to inhibit the metabolism of the cells and where it is desirable to have limited amounts of substrate in the medium. Using a fed-batch system, it is possible to maintain a steady concentration of substrate while accommodating maximum bioconversion of the substrate to product.

[0193] Batch and fed-batch fermentations are common and well known in the art and examples may be found in, for example Brock, Thomas D., In Biotechnology: A Textbook of Industrial Microbiology, 2nd ed.; Sinauer Associates, Inc.: Sunderland, Mass., 1989.

[0194] Continuous fermentation is an open system wherein a defined fermentation medium is added continuously to a bioreactor and an equal amount of conditioned medium is removed simultaneously for processing. Continuous fermentation generally maintains the cultures at a constant high density. Continuous fermentation allows for the modulation of one factor or any number of factors that affect cell growth or end product concentration. For example, one method will maintain a limiting nutrient such as the carbon source or nitrogen source at low concentration and allow all other parameters to be in excess. In other systems, a number of factors affecting growth can be altered continuously while the cell concentration, measured by medium turbidity, is kept constant. Continuous systems strive to maintain steady state growth conditions and thus the cell loss due to medium being drawn off must be balanced against the cell growth rate in the fermentation. Methods of modulating nutrients and growth factors for continuous fermentation processes as well as techniques for maximizing the rate of product formation are well known in the art of industrial microbiology and a variety of methods are detailed by Brock, supra.

[0195] It is a further objective of this invention to provide an inexpensive means for controlling potentially harmful microorganisms that may be present, for example, in aqueous-containing systems, such as aquariums. The methods are also applicable to the sterilization of effluents from sewage treatment facilities, including sludge, and contaminated effluents from manufacturing plants.

[0196] It is an additional object of this invention to provide a method for protecting the surfaces of various articles against the growth of microorganisms by incorporating an antibacterial agent of the present invention into coatings for applying on said surfaces. Thus, the present invention provides for an antifouling composition comprising a carrier suitable for underwater application and an effective antifouling amount of at least one bioactive agent derived from TM1040 strain of the present invention. Thus, the present invention is directed to antibacterial compounds and/or extracts of TM1040, an aquatic microorganism that has the ability to repel, prevent or otherwise deter aquatic pests from settling on or near target locations.

[0197] In one embodiment, TM1040 bacteria may be removed from the culture medium and then blender homogenized in distilled water (about 1:3 weight/volume). The resulting homogenate can be lyophilized, resuspended in hexane and sonicated for about 30 minutes. The resulting mixture can then be centrifuged resulting in a supernatant and a pellet. The solvent can then be removed from the supernatant using a vortex vacuum evaporator. The pellet can be extracted, centrifuged and the resulting supernatant is separated from the resulting pellet. Each extract can easily be tested for antibacterial activity as described below.

[0198] In an alternative embodiment, the collected, cleansed TM1040 microorganism can be blended and extracted overnight by immersion in solvent. After extraction, the liquid is removed and centrifuged and the supernatant is vacuum dried to obtain a solvent extract concentrate. Tissues remaining in the beaker are air dried, e.g., in a hood, and subjected to further solvent extraction and each extract is then tested for antibacterial activity as described below.

[0199] Assays may be conducted by assaying for bacterial inhibition activity, mussel byssal attachment activity, bacterial anti-settlement activity, and larvae anti-settlement activity.

[0200] To perform the bacterial inhibition assay a dried extract is dissolved in about 2 ml of original solvent to get a saturated solution. About twenty to fifty (20-50) ul of each solution is added to a sterile bio-assay disc (6 mm Difco™ 1599-33) and air dried. Three discs with extract and two control discs with only solvent (all vacuum dried) are placed on a semi-solid (half usual concentration) tryptic soy agar (TSA) plate inoculated with a dilute microbial suspension. The plates are incubated for about 24 hours at room temperature. Different bacteria can be used in the antibiotic assay for each extract. The halo around the disc is measured and the assay scored depending on the size of the halo.

[0201] To perform the mussel byssal thread attachment assay, juvenile blue mussels, Mytilus edulis, are used. The sample zone is coated with TM1040. The mussels are fixed around the edge of the sample zone using a commercial underwater compatible glue. The bioassay slides prepared in this way are placed at the bottom of an aquarium with running sea water. The mussels will attempt to attach themselves on the slide using many byssal threads. If an extract was antibacterial or active as a biorepellent, most byssal threads secreted by mussels avoid the sample zone.

[0202] To perform the bacterial anti-settlement assay, an extract is spread onto the frosted portion of glass slides and the solvent evaporated. An equal number of control slides should be prepared. Each slide is placed for contact with bacteria that is considered to be detrimental. The growth of the attached bacteria is counted.

[0203] Thus, in another aspect, the present invention provides compositions that reduce or completely eliminate fouling of underwater structures by aquatic pests. The compositions include a carrier, which contains at least one of the above-described antibacterial or antifouling agents that repel, prevent or otherwise deter aquatic pests from settling on structures incorporating the compositions. In accordance with one aspect of the present invention, the unique combination of carrier and antifouling agent augment one another by creating a slippery surface which causes problems for organisms attempting to anchor on the surface and, further, a chemically hostile local environment that the organisms find “distasteful” and in some cases toxic.

[0204] The antibacterial agent according to the present invention can be incorporated into structural members to provide aquatic pest repellent structures that are intended to be placed in aquatic environments. In this manner, the structure itself has integral aquatic pest repellency. The inventive antibacterial agents can also be incorporated into surface coatings of structures intended for underwater use. Materials that can incorporate the antifouling agents are known and must be compatible with the antibacterial/antifouling agents, i.e., there is no interaction between the materials and the bioactive agents that degrades or is otherwise detrimental to the activity of the agents, including phenolic resins, silicone polymers, chlorinated rubbers, coal tar and epoxy combinations, epoxy resin cured from a solvent solution with polyfunctional amines, polyamide resins, vinyl resins in solvent solutions, elastomers, fluoropolymers, polyesters and polyurethanes.

[0205] Vehicles (a structure or coating) which contain one or more repellent agents provide a medium, which allow the antibacterial agents to exert bioactivity in the locus to be protected over a period of time either by sustained release of the agent(s) or by creating a fixed effective surface concentration of the agent.

[0206] Diffusional systems are well suited to release the antibacterial agents to target areas. Diffusional systems include reservoir devices in which a core of the antibacterial agent is surrounded by a porous membrane or layer, or matrix devices in which the bioactive agent is distributed throughout an inert matrix.

[0207] Bioactive agents according to the present invention may be applied as surface coatings by painting or otherwise bonding or adhering a liquid or paste-like composition containing the repellent to the material intended for underwater use. The coatings may be applied in a variety of ways that are known in the art.

[0208] Microencapsulation techniques are useful in maintaining sustained focal release of bioactive agents according to the present invention. Microencapsulation may also be used for providing improved stability of the antifouling composition. The active agents of the present invention may be microencapsulated in structures in the form of spheres, aggregates of core material embedded in a continuum of wall material, capillary designs or incorporated into films and paints. The core material of a microcapsule containing a bioactive agent of the present invention may be in the form of a liquid droplet, an emulsion, a suspension of solids, a solid particle, or a crystal. The microcapsule coating material may be an organic polymer, hydrocolloid, wax, fat, lipid, metal, or inorganic oxide. Silicone polymers are the most preferred microcapsule coating material for use with the present invention.

[0209] The bioactive repellent in association with an acceptable carrier may be applied to submersible or submerged surfaces such as water intake systems, water cooling tubes, heat exchangers, and any other surfaces that are subject to biofouling. For example, the composition may be employed as an antifouling composition for boat hulls, fishing netting, buoys, pilings, lumber, roofs, and concrete. Dipping, spraying, brushing and laminating are other means for applying the antifouling composition.

[0210] Furthermore, the novel antifouling composition may be used for removing microorganisms from surfaces in hospitals or other surfaces where an aseptic environment is desirable.

[0211] In another embodiment, a nucleotide sequence encoding for the antibacterial agent is included in an expression vector or plasmid for transfection and expression in a compatible bacteria. For example, E. coli can be transformed using pBR322, a plasmid derived from an E. coli species. pBR322 contains genes for ampicillin and tetracycline resistance and thus provides easy means for identifying transformed cells. The pBR plasmid, or other microbial plasmid or phage must also contain, or be modified to contain, promoters which can be used by the microbial organism for expression of its own polypeptides.

[0212] In addition to prokaryotes, eukaryotic microbes, such as yeast can also be used. Saccharomyces cerevisiae or common baker's yeast is the most commonly used among eukaryotic microorganisms, although a number of other strains are commonly available. For expression in Saccharomyces, the plasmid YRp7, for example, is commonly used. This plasmid already contains the trp1 gene, which provides a selection marker for a mutant strain of yeast lacking the ability to grow in tryptophan, for example ATCC No. 44076 or PEP4-1. The presence of the trp1 lesion as a characteristic of the yeast host cell genome then provides an effective environment for detecting transformation by growth in the absence of tryptophan. Suitable promoter sequences in yeast vectors include the promoters for 3-phosphoglycerate kinase or other glycolytic enzymes such as enolase, glyceraldehyde-3-phosphate dehydrogenase, hexokinase, pyruvate decarboxylase, phosphofructokinase, glucose-6-phosphate isomerase, 3-phosphoglycerate mutase, pyruvate kinase, triosephosphate isomerase, phosphoglucose isomerase, and glucokinase.

[0213] In constructing suitable expression plasmids, the termination sequences associated with these genes are also introduced into the expression vector downstream from the sequences to be expressed to provide polyadenylation of the mRNA and termination. Other promoters, which have the additional advantage of transcription controlled by growth conditions are the promoter region for alcohol dehydrogenase 2, isocytochrome C, acid phosphatase, degradative enzymes associated with nitrogen metabolism, and the aforementioned glyceraldehyde-3-phosphate dehydrogenase, and enzymes responsible for maltose and galactose utilization. Any plasmid vector containing a yeast-compatible promoter, origin or replication and termination sequences is suitable.

[0214] The examples and embodiments depicted in this specification are not intended to be limitations on the inventive concept described herein. Accordingly, one with skill in the art may make modifications in the methods and products that are intended to be covered by the following claims.

### Examples

### TM1040 Produces an Antibacterial Activity

[0215] Sterile filtrates and ethyl acetate extracts of spent TM1040 culture medium were placed into wells cored in a nutrient agar medium in which Vibrio anguillarum had been inoculated (FIG. 1). Following incubation at room temperature for 48 h, the plates were scored for the presence of a zone of clearing around each well, indicating that V. anguillarum had been killed or the growth of the bacteria significantly inhibited. Roseobacter 27-4 served as a positive control in this experiment and produced significant antibacterial activity when grown under static conditions in broth, but not when incubated with vigorous shaking. This result agrees with that reported by Bruhn et al (9). As can be observed in FIG. 1, a zone of clearing was also observed around the well containing the TM1040 extract.

Antibacterial Activity is Correlated with Pigment Production

[0216] A nonpigmented variant of TM1040 (FIG. 1, static, lower left well) produced less antibacterial activity than the wild-type strain (FIG. 1, shaking, lower left well), which agrees with the observations reported by Bruhn et al (9) for 27-4.

### Production of the Antibacterial Activity Occurs in Both Static and Shaking Broth Cultures.

[0217] TM1040 that was grown with vigorous shaking produced a much larger zone of inhibition than the control (Roseobacter 27-4; FIG. 1). This was unexpected, since previous reports (9) indicated that the antibacterial activity was only produced in under static growth conditions. This result was confirmed and the results shown in FIG. 2. Although the plate bioassay for antibacterial activity is only semiquantitative, TM1040 produces ca. 4-5× more activity when grown under shaking (aerobic) conditions than under static or anaerobic conditions. TM1040 produces comparable levels of antibacterial activity to 27-4 under static growth, but ca. 8-10× greater activity when the bacteria are grown aerobically (shaking culture). This suggests that the antibacterial activity of TM1040 is constitutively expressed, compared to that of 27-4, which is only expressed in broth media under static conditions.

[0218] The TM1040 antibacterial activity kills Mycobacterium marinum, Vibrio anguillarum, V. coralliilyticus, and V. shiloi.

[0219] Culture medium extracts from TM1040 grown under static conditions were used to test their effect on inhibiting the growth of known human, fish, and coral pathogens. M. marinum, a close relative of M. tuberculosis (the causative agent of human tuberculosis), is recognized as a pathogen of humans and many animals, including fish (3). In aquaculture, M. marinum is considered the primary causative agent of fish mycobacteriosis, although several Mycobacterium species associated with tubercle granulomas in aquarium, cultured, and wild fish populations have been described (20-22, 29). Mycobacteriosis in fish is characterized by emaciation, inflammation and ulceration of skin leading to open lesions, which reduce the overall condition of the fish, and often render the fish unsuitable for human consumption. The disease is especially prevalent in the Chesapeake Bay and in aquacultured striped bass underscoring the need to find suitable treatments to prevent the disease.

[0220] M. marinum was used in the plate bioassay to test the effectiveness of TM1040 culture extracts in killing this bacterium. The results shown in FIG. 3 confirm that TM1040 culture extracts possess one or more components capable of killing M. marinum.

[0221] Extracts of TM1040 were tested for their ability to inhibit the growth of V. coralliilyticus and V. shiloi, two pathogens of reef-building corals (4-7, 23). The results from these tests are shown in FIGS. 4 and 5. Extracts from both static and shaking cultures of TM1040 markedly inhibited the growth of these vibrios. Taken together with the earlier results, TM1040 extracts effectively kill three pathogenic Vibrio species: V. anguillarum, V. coralliilyticus, and V. shiloi.

### The Antibacterial Activity Causes No Adverse Reactions in Fish Larvae

[0222] Sterile filtrates of spent culture supernatants were tested for their effects on 2-3 day-old zebrafish (Danio rerio) larvae with the results set for below in Table 6.

TABLE 6
Zebrafish toxicity assay.

Dilution

| Supernatant Added | ¼ | ⅛ | 1/16 | 1/32 | 1/64 |
|---|---|---|---|---|---|
| TM1040 | 3/6^{a} | 5/6 | 6/6 | 6/6 | 6/6 |
| Uninoculated medium | 0/6 | 0/6 | 0/6 | 0/6 | 6/6 |
| Water | 6/6 | 6/6 | 6/6 | 6/6 | 6/6 |

^{a}Number of embryos alive after 24 h.

[0223] The viability of the fish embryos was unaffected by addition of TM1040 spent medium, except when at a very high concentration (1-to-4 dilution) where 3 of the 6 embryos died. Therefore, the antibacterial activity of TM1040 is not a general toxin and does not adversely affect larval fish. When dilutions of fresh uninoculated medium were added to the fish larvae, the embryos died even at the lowest concentration (1/64) used. These deaths were most likely caused by an increase in the autochthonous bacterial population naturally associated with the zebrafish. Addition of culture medium containing the TM1040 antibacterial activity in contrast had minimal affect on the health of the larvae, suggesting that the antibacterial activity in the filtrates prevented the death of the embryos.

### REFERENCES

[0224] The contents of all cited references are hereby incorporated by reference herein for all purposes.
[0225] 1. Alavi, M., and R. Belas. 2001. Surface sensing, swarmer cell differentiation and biofilm development. Methods Enzymol. 336:29-40.
[0226] 2. Alavi, M., T. Miller, K. Erlandson, R. Schneider, and R. Belas. 2001. Bacterial community associated with Pfiesteria-like dinoflagellate cultures. Environ. Microbiol. 3:380-396.
[0227] 3. Belas, R., P. Faloon, and A. Hannaford. 1995. Potential applications of molecular biology to the study of fish mycobacteriosis. Annu. Rev. Fish Dis. 5: 133-173.
[0228] 4. Ben-Haim, Y., E. Banim, A. Kushmaro, Y. Loya, and E. Rosenberg. 1999. Inhibition of photosynthesis and bleaching of zooxanthellae by the coral pathogen Vibrio shiloi. Environ. Microbiol. 1:223-229.
[0229] 5. Ben-Haim, Y., and E. Rosenberg. 2002. A novel Vibrio sp. pathogen of the coral Pocillopora damicornis. Marine Biol. 141:47-55.
[0230] 6. Ben-Haim, Y., F. L. Thompson, C. C. Thompson, M. C. Cnockaert, B. Hoste, J. Swings, and E. Rosenberg. 2003. Vibrio coralliilyticus sp. nov., a temperature-dependent pathogen of the coral Pocillopora damicornis. Int. J. Syst. Evol. Microbiol. 53:309-315.
[0231] 7. Ben-Haim, Y., M. Zicherman-Keren, and E. Rosenberg. 2003. Temperature-regulated bleaching and lysis of the coral Pocillopora damicornis by the novel pathogen Vibrio coralliilyticus. Appl. Environ. Microbiol. 69:4236-4242.
[0232] 8. Brinkhoff, T., G. Bach, T. Heidorn, L. Liang, A. Schlingloff, and M. Simon. 2004. Antibiotic production by a Roseobacter clade-affiliated species from the German Wadden Sea and its antagonistic effects on indigenous isolates. Appl. Environ. Microbiol. 70:2560-2565.
[0233] 9. Bruhn, J. B., K. F. Nielsen, M. Hjelm, M. Hansen, J. Bresciani, S. Schulz, and L. Gram. 2005. Ecology, inhibitory activity and morphogenesis of a marine antagonistic bacteria belonging to the Roseobacter clade. Appl. Environ. Microbiol. in press.
[0234] 10. Eilers, H., J. Pernthaler, J. Peplies, F. O. Glockner, G. Gerdts, and R. Amann. 2001. Isolation of novel pelagic bacteria from the German bight and their seasonal contributions to surface picoplankton. Appl. Environ. Microbiol. 67:5134-5142.
[0235] 11. Gonzalez, J. M., R. Simo, R. Massana, J. S. Covert, E. O. Casamayor, C. Pedros-Alio, and M. A. Moran. 2000. Bacterial community structure associated with a dimethylsulfoniopropionate-producing North Atlantic algal bloom. Appl. Environ. Microbiol. 66:4237-4246.
[0236] 12. Hjelm, M., O. Bergh, A. Riaza, J. Nielsen, J. Melchiorsen, S. Jensen, H. Duncan, P. Ahrens, H. Birkbech, and L. Gram. 2004. Selection and identification of autochthonous potential probiotic bacteria from turbot larvae (Scophthalmus maximus) rearing units. Syst. Appl. Microbiol. 27:360-371.
[0237] 13. Hjelm, M., A. Riaza, F. Formoso, J. Melchiorsen, and L. Gram. 2004. Seasonal incidence of autochthonous antagonistic Roseobacter spp. and Vibrionaceae strains in a turbot larva (Scophthalmus maximus) rearing system. Appl. Environ. Microbiol. 70:7288-7294.
[0238] 14. Jansen, M. 2000. Microbial demethylation of dimethylsulfoniopropionate and methylthiopropionate. Ph.D. Rijksuniversitet, Groningen, The Netherlands.
[0239] 15. Liang, L. 2003. Investigation of secondary metabolites of North Sea bacteria: fermentation, isolation, structure elucitation and bioactivity. Dissertation. Universitat zu Gottingen, Gottingen, Sweden.
[0240] 16. Miller, T. R., and R. Belas. 2004. Dimethylsulfoniopropionate (DMSP) metabolism by Pfiesteria-associated Roseobacter spp. Appl. Environ. Microbiol. 70:3383-3391.
[0241] 17. Miller, T. R., and R. Belas. 2003. Pfiesteria piscicida, P. shumwayae, and other Pfiesteria-like dinoflagellates. Res. Microbiol. 154:85-90.
[0242] 18. Miller, T. R., K. Hnilicka, A. Dziedzic, P. Desplats, and R. Belas. 2004. Chemotaxis of Silicibacter sp. TM1040 towards dinoflagellate products. Appl. Environ. Microbiol. 70:4692-4701.
[0243] 19. Rao, D., J. S. Webb, and S. Kjelleberg. 2005. Competitive interactions in mixed-species biofilms containing the marine bacterium Pseudoalteromonas tunicata. Appl. Environ. Microbiol. 71:1729-1736.
[0244] 20. Rhodes, M. W., H. Kator, I. Kaattari, D. Gauthier, W. Vogelbein, and C. A. Ottinger.
[0245] 2004. Isolation and characterization of mycobacteria from striped bass Morone saxatalis from Chesapeake Bay. Dis. Aquat. Org. 61:41-51.
[0246] 21. Rhodes, M. W., H. Kator, S. Kotob, P. van Berkum, I. Kaattari, W. Vogelbein, M. M. Floyd, W. R. Butler, F. D. Quinn, C. Ottinger, and E. Shotts. 2001. A unique Mycobacterium species isolated from an epizootic of striped bass (Morone saxatilis). Emerging Infect. Dis. 7:896-899.
[0247] 22. Rhodes, M. W., H. Kator, S. Kotob, P. van Berkum, I. Kaattari, W. K. Vogelbein, F.
[0248] Quinn, M. M. Floyd, W. R. Butler, and C. A. Ottinger. 2003. Mycobacterium shottsii sp. nov., a slowly growing species isolated from Chesapeake Bay striped bass (Morone saxatilis). Int. J. Syst. Evol. Microbiol. 53:421-424.
[0249] 23. Rosenberg, E., and Y. Ben-Haim. 2002. Microbial diseases of corals and global warming. Environ. Microbiol. 4:318-326.
[0250] 24. Ruger, H. J., and M. G. Hofle. 1992. Marine star-shaped-aggregate-forming bacteria: Agrobacterium atlanticum sp. nov.; Agrobacterium meteori sp. nov.; Agrobacterium ferrugineum sp. nov., nom. rev.; Agrobacterium gelatinovorum sp. nov., nom. rev.; and Agrobacterium stellulatum sp. nov., nom. rev. Int. J. Syst. Bacteriol. 42:133-143.
[0251] 25. Ruiz-Ponte, C., V. Cilia, C. Lambert, and J. Nicolas. 1998. Roseobacter gallaeciensis sp. nov., a new marine bacterium isolated from rearings and collectors of the scallop Pecten maximus. Int. J. Syst. Evol. Microbiol. 48:537-542.
[0252] 26. Ruiz-Ponte, C., J. F. Samain, J. L. Sanchez, and J. L. Nicholas. 1999. The benefit of a Roseobacter species on the survival of scallop larvae. Marine Biotechnology 1:52-59.
[0253] 27. Tsubotani, S., Y. Wada, K. Kamiya, H. Okazaki, and S. Harada. 1984. Structure of thiotropocin, a new sulfur-containing 7-membered antibiotic. Tetrahedron Lett. 25:419-422.
[0254] 28. Uchino, Y., A. Hirata, A. Yokota, and J. Sugiyama. 1998. Reclassification of marine Agrobacterium species: proposals of Stappia stellulata gen. nov., comb. nov., Stappia aggregata sp. nov., nom. rev., Ruegeria atlantica gen. nov., comb. nov., Ruegeria gelatinovora comb. nov., Ruegeria algicola comb. nov., and Ahrensia kieliense gen. nov., sp. nov., nom. rev. J. Gen. Appl. Microbiol. 44:201-210.
[0255] 29. Zeligman, I. 1972. Mycobacterium marinum granuloma. A disease acquired in the tributaries of Chesapeake Bay. Arch. Dermatol. 106:26-31.
[0256] 30. Adler, J. 1966. Chemotaxis in bacteria. Science 153:708-716.
[0257] 31. Altschul, S., W. Gish, W. Miller, E. Myers, and D. Lipman. 1990. Basic local alignment search tool. J. Mol. Biol. 215:403-410.
[0258] 32. Ansede, J., P. J. Pellechia, and D. C. Yoch. 1999. Metabolism of acrylate to β-hydroxypropionate and its role in dimethylsulfoniopropionate lyase induction by a salt marsh sediment bacterium, Alcaligenes faecalis M3A. Appl. Environ. Microbiol. 65:5075-5081.
[0259] 33. Ansede, J. H., P. J. Pellechia, and D. C. Yoch. 2001. Nuclear magnetic resonance analysis of [1-¹³C]dimethylsulfoniopropionate (DMSP) and [1-¹³C]acrylate metabolism by a DMSP lyase-producing marine isolate of the α-subclass of Proteobacteria. Appl. Environ. Microbiol. 67:3134-3139.
[0260] 34. Ausubel, F. M. 2001. Current protocols in molecular biology. J. Wiley, New York, N.Y.
[0261] 35. Ausubel, F. M. 1982. Molecular genetics of symbiotic nitrogen fixation. Cell 29:1-2.
[0262] 36. Blackburn, N., T. Fenchel, and J. Mitchell. 1998. Microscale nutrient patches in planktonic habitats shown by chemotactic bacteria. Science 282:2254-2256.
[0263] 37. Burkholder, J. M., E. J. Noga, C. H. Hobbs, H. B. Glasgow, Jr., and S. A. Smith. 1992. New ‘phantom’ dinoflagellate is the causative agent of major estuarine fish kills. Nature 358:407-410.
[0264] 38. Cascales, R., and P. J. Christie. 2004. Definition of a bacterial type IV secretion pathway for a DNA substrate. Science 304:1170-1173.
[0265] 39. Chambers, S. T., C. M. Kunin, D. Miller, and A. Hamada. 1987. Dimethylthetin can substitute for glycine betaine as an osmoprotectant molecule for Escherichia coli. J. Bacteriol. 169:4845-4847.
[0266] 40. Christie, P. J. 2004. Type IV secretion: the Agrobacterium VirB/D4 and related conjugation systems. Biochim. Biophys. Acta 1694:219-234.
[0267] 41. Christie, P. J., and J. P. Vogel. 2000. Bacterial type IV secretion: conjugation systems adapted to deliver effector molecules to host cells. Trends Microbiol. 8:354-360.
[0268] 42. Cole, J. J. 1982. Interactions between bacteria and algae in aquatic ecosystems. Annu. Rev. Ecol. Syst. 13:291-314.
[0269] 43. DeLoney-Marino, C. R., A. J. Wolfe, and K. L. Visick. 2003. Chemoattraction of Vibrio fischeri to serine, nucleosides, and N-acetylneuraminic acid, a component of squid light-organ mucus. Appl. Environ. Microbiol. 69:7527-7530.
[0270] 44. Doucette, G. J. 1995. Interactions between bacteria and harmful algae: a review. Natural Toxins 3:65-74.
[0271] 45. Ferris, M. J., G. Muyzer, and D. M. Ward. 1996. Denaturing gradient gel electrophoresis profiles of 16S rRNA-defined populations inhabiting a hot spring microbial mat community. Appl. Environ. Microbiol. 62:340-346.
[0272] 46. Fuller, M. E., S. H. Streger, R. K. Rothmel, B. J. Mailloux, J. A. Hall, T. C. Onstott, J. K. Fredrickson, D. L. Balkwill, and M. F. DeFlaun. 2000. Development of a vital fluorescent staining method for monitoring bacterial transport in subsurface environments. Appl. Environ. Microbiol. 66:4486-4496.
[0273] 47. Garg, B., R. C. Dogra, and P. K. Sharma. 1999. High-efficiency transformation of Rhizobium leguminosarum by electroporation. Appl. Environ. Microbiol. 65:2802-2804.
[0274] 48. Giovannoni, S., and M. Rappe. 2000. Evolution, diversity, and molecular ecology of marine prokaryotes, p. 47-84. In D. L. Kirchman (ed.), Microbial ecology of the oceans. Wiley-Liss, New York, N.Y.
[0275] 49. Gonzalez, J. M., and M. A. Moran. 1997. Numerical dominance of a group of marine bacteria in the alpha-subclass of the class Proteobacteria in coastal seawater. Appl. Environ. Microbiol. 63:4237-4242.
[0276] 50. Gonzalez, J. M., R. P. Kiene, and M. A. Moran. 1999. Transformation of sulfur compounds by an abundant lineage of marine bacteria in the alpha-subclass of the class Proteobacteria. Appl. Environ. Microbiol. 65:3810-3819.
[0277] 51. Gonzalez, J. M., J. S. Covert, W. B. Whitman, J. R. Henriksen, F. Mayer, B. Scharf, R. Schmitt, A. Buchan, J. A. Fuhrman, R. P. Kiene, and M. A. Moran. 2003. Silicibacter pomeroyi sp. nov. and Roseovarius nubinhibens sp. nov., DMSP demethylating bacteria from marine environments. Int. J. Syst. Evol. Microbiol. 53:1261-1269.
[0278] 52. Gram, L., H. P. Grossart, A. Schlingloff, and T. Kiorboe. 2002. Possible quorum sensing in marine snow bacteria: production of acylated homoserine lactones by Roseobacter strains isolated from marine snow. Appl. Environ. Microbiol. 68:4111-4116.
[0279] 53. Guillard, R. R. L. 1975. Culture of phytoplankton for feeding marine invertebrates. Plenum Press, New York, N.Y.
[0280] 54. Hapfelmeier, S., N. Domke, P. C. Zambryski, and C. Baron. 2000. VirB6 is required for stabilization of VirB5 and VirB3 and formation of VirB7 homodimers in Agrobacterium tumefaciens. J. Bacteriol. 182:4505-4511.
[0281] 55. Hoch, J., and T. Silhavy. 1995. Two-component signal transduction. American Society for Microbiology Press, Washington, D.C.
[0282] 56. Hold, G. L., E. A. Smith, M. S. Rappe, E. W. Maas, E. R. B. Moore, C. Stroempl, J. R. Stephen, J. I. Prosser, T. H. Birkbeck, and S. Gallacher. 2001. Characterisation of bacterial communities associated with toxic and non-toxic dinoflagellates: Alexandrium spp. and Scrippsiella trochoidea. FEMS Microbiol. Ecol. 37: 161-173.
[0283] 57. Jacobs, C., N. Ausmees, S. J. Cordwell, L. Shapiro, and M. T. Laub. 2003. Functions of the CckA histidine kinase in Caulobacter cell cycle control. Mol. Microbiol. 47:1279-1290.
[0284] 58. Jansen, M., and T. A. Hansen. 1998. Tetrahydrofolate serves as a methyl acceptor in the demethylation of dimethylsulfoniopropionate in cell extracts of sulfate-reducing bacteria. Arch. Microbiol. 169:84-87.
[0285] 59. Keller, M. D., and W. Korjeff-Bellows. 1996. Physiological aspects of the production of dimethylsulfoniopropionate (DMSP) by marine phytoplankton, p. 131-153. In R. P. Kiene, P. T. Visscher, M. D. Keller, and G. O. Kirst (ed.), Biological and environmental chemistry of DMSP and related sulfonium compounds. Plenum Press, New York, N.Y.
[0286] 60. Kiene, R. P., L. J. Linn, J. Gonzalez, M. A. Moran, and J. A. Bruton. 1999. Dimethylsulfoniopropionate and methanethiol are important precursors of methionine and protein-sulfur in marine bacterioplankton. Appl. Environ. Microbiol. 65:4549-4558.
[0287] 61. Kiene, R. P. 1996. Production of methanethiol from dimethylsulfoniopropionate in marine surface waters. Mar. Chem. 54:69-83.
[0288] 62. Lang, A. S., and J. T. Beatty. 2002. A bacterial signal transduction system controls genetic exchange and motility. J. Bacteriol. 184:913-918.
[0289] 63. Letunic, I., R. R. Copley, S. Schmidt, F. D. Ciccarelli, T. Doerks, J. Schultz, C. P. Lukashin, A. V., and M. Borodovsky. 1998. GeneMark.hmm: new solutions for gene finding. Nucleic Acids Res. 26:1107-1115.
[0290] 64. Macnab, R. M. 2004. Type III flagellar protein export and flagellar assembly. Biochim. Biophys. Acta 1694:207-217.
[0291] 65. Osing a, R., K. de Vries, W. Lewis, W. van Raaphorst, L. Dijkhuizen, and F. van Duyl. 1997. Aerobic degradation of phytoplankton debris dominated by Phaeocystis sp. in different physiological stages of growth. Aquat. Microb. Ecol. 12:11-19.
[0292] 66. Ponting, and P. Bork. 2004. SMART 4.0: towards genomic data integration. Nucleic Acids Res. 32:142-144.
[0293] 67. Reisenauer, A., K. Quon, and L. Shapiro. 1999. The CtrA response regulator mediates temporal control of gene expression during the Caulobacter cell cycle. J. Bacteriol. 181:2430-2439.
[0294] 68. Sambrook, J., E. F. Fritsch, and T. Maniatis. 1989. Molecular cloning: a laboratory manual, 2nd ed. Cold Spring Harbor Laboratory Press, Cold Spring Harbor, N.Y.
[0295] 69. Schmitt, R., I. Raska, and F. Mayer. 1974. Plain and complex flagella of Pseudomonas rhodos: analysis of fine structure and composition. J. Bacteriol. 117:844-857.
[0296] 70. Shiba, T. 1991. Roseobacter litoralis gen. nov., sp. nov., and Roseobacter denitrificans sp. nov., aerobic pink-pigmented bacteria which contain bacteriochlorophylla. Syst. Appl. Microbiol. 14:140-145.
[0297] 71. Visscher, P. T., and B. F. Taylor. 1994. Demethylation of dimethylsulfoniopropionate to 3-mercaptopropionate by an aerobic marine bacterium. Appl. Environ. Microbiol. 60:4617-4619.
[0298] 72. Wang, Q., J. R. Deeds, A. R. Place, and R. Belas. 2005. Dinoflagellate community analysis of a fish kill using denaturing gradient gel electrophoresis. Harmful Algae 4:151-162.
[0299] 73. Wei, X., and W. D. Bauer. 1998. Starvation-induced changes in motility, chemotaxis, and flagellation of Rhizobium meliloti. Appl. Environ. Microbiol. 64: 1708-1714.
[0300] 74. West, M., N. M. Burdash, and F. Freimuth. 1977. Simplified silver-plating stain for flagella. J. Clin. Microbiol. 6:414-419.
[0301] 75. Wolfe, A. J., and H. C. Berg. 1989. Migration of bacteria in semisolid agar. Proc. Natl. Acad. Sci. USA 86:6973-6977.
[0302] 76. Yoch, D. C. 2002. Dimethylsulfoniopropionate: its sources, role in the marine food web, and biological degradation to dimethylsulfide. Appl. Environ. Microbiol. 68:5804-5815.
[0303] 77. Yoch, D. C., J. H. Ansede, and K. S. Rabinowitz. 1997. Evidence for intracellular and extracellular dimethylsulfoniopropionate (DMSP) lyases and DMSP uptake sites in two species of marine bacteria. Appl. Environ. Microbiol. 63:3182-3188.
[0304] 78. Zhong, Z., R. Caspi, D. Helinski, V. Knauf, S. Sykes, C. O'Byrne, T. P. Shea, J. E. Wilkinson, C. DeLoughery, and A. Toukdarian. 2003. Nucleotide sequence based characterizations of two cryptic plasmids from the marine bacterium Ruegeria isolate PR1b. Plasmid 49:233-252.
[0305] 79. Zubkov, M. V., B. M. Fuchs, S. D. Archer, R. P. Kiene, R. Amann, and P. H. Burkill. 2001. Linking the composition of bacterioplankton to rapid turnover of dissolved dimethylsulphoniopropionate in an algal bloom in the North Sea Environ. Microb. 3:304-311.

The application's sequence listing, which the Patent Office published only in electronic form, follows.

SEQUENCE LISTING (16 sequences)

SEQ ID NO: 1 - DNA, 663814 bp, Silicibacter sp.
gactttgtgtcgtggcgctcagagatcagctgagcgaggcgcagaagcgctggatgcgcgtgcaggcttccttgagggcgtcatcggaggttgcatagctcacacgaaaattcggcgagaggccaaaggctgcgccaaacaccacggccacatcggcctcttccagaagggcggtggcaaaatcctcatcgctgttgatggttacgccttttggcgttgtcttgccaatgagacccgcgatcgaggggtagacataaaaagcgccctccggcaccgggcaggtcaagccatcgatctccgacagcatcgacaccaccagattgcgccgccgcacgaagatctcattgttgctggcgaggaaatcctgcggccccgtgagcgcttcgagcgcggcatattggctgaccgaacaggggttcgaggtagactgcgactgcaccttgcgcatcgccgcaatcagagtttccggacccgccgcatagccgatccgccagccagtcatcgcataggctttggaaaccccgttgcaggtgagggtgcggtcatagagtcccggttcaacctgcgccggtgtgcagaattcgaaatcgtcataggcgaggtgttcatacatgtcatcggtcatcacccagacatggggatgacgcatcaagacatccgtcagagctttcaattcggcgcgcgaatatccggctccggtcgggttggagggagaattgaagatgaaccatttggtcttgtcggtgatggcggcctccaactgatcgggcgtcagtttgaagctgctctcaaggctggcctccaccggaaccggagtgcctcctgcaaggagcaccatgtcaggatagctcacccaatagggcgcggggatgatcacctcatcgccgggattgagggtcgccatcagggcgttatacagcgtctgcttgccgccagagtttaccgtgacctgctccgggcgatagtccaggccattgtcacgcttgaacttttcgcagatggtctgcttcagctccgggatgccatcgacggctgtgtatttggtcttgccctcggcaatggcacggacagcggcatccttgatggattgtggcgtgtcgaaatccggttcccccgcaccaaggccgatcacgtcgcgaccggcggctttcaattcacgcgccttattggtgacggcaatggtcggggaaggcttcacgcgggaaagtgtcgcagaaagaacggacatgtcggacctcgatttgaatgtcatctgcaaaactcttagggtggcgccaaacggcaatcaagtcgtccacttaggagagaccgcatgaccgacacgacgagcgactggtatggccccgatgccgcaacttttggagatcgcgtcgcggccgcacgtgaaagcgctggcatgacacaaggccagctggcacgccgtatgggggtgaaaaaatccaccctgatcggttgggagcaggatctgtccgagccccgggccaacaaactctcgacgctctcggggattctcaatgtatcgatgagctggctgctgaccggcgaaggcgatgagctctcggcgcccaatgaggacacgctgggcgaagatatggccgctatcgcccgcgaattgcgcagccttcgcgaggagctgcgtcagcaggccgaacgcgccggacgtctggagaaaagcctgcgccgtcttgttgccacgcaggaggcggctgaatgatcgaagcgcaggccaacatcgaagaaagccgcgagacccgtatcaagcgcctgaccatgcgctcgatgcggcgcggtatcaaggaaatggacattctcctgtccggctatgcggccgcgaatctcgcggccatgagtgatgctcaactcgcgctatatgacgcgttgctgcgcgaaaacgaccaggatctttaccaatgggtaacaggtcaaacacccgcgccggaacgctttaacgctctggtcgatgaaatctctagaacataccaaaaataaaagagaaatccggtttaacgcattttcaggaaattccctccatatttgtcatgaagcaatttcgattcggagatgctgaatgagtatggaacgaccaatcagccagctggaccgcaaggggttcatgactggttatcttgatgccctggcactggtggagcgtttgcaccgcctgttgcttgatgtcatcaaggatgagtttgaacgcgtaggtgtccttgacatcaacgcggtgcaggctctgttgctgttcaacattggcgacaatgaggtgactgccggggaactcaaaacccgtggttactatcagggcagcaacgtaagctacaatctgaagaagctggtggagatgggctatatgcaccatcaacgctgcgagatcgaccgcaggtcggtgcgtgtgcgtcttactccccgtggccgtgaaattcgcgatatcgttgcctcgctgttttcgcgtcacgcagagggtctggaaaccaaaggcgtgatcagcgccgaagggatcgaggacatcactggctccctcaaacgcatggagcggtactggtccgaccagattcgctacatctattaagaaccgtttttcgggcctttaggttcgtgggacatttaagacagcagttttcaggctccagattctgacgttcggcatcgccgtaccgcgcatctggcctcgccacgaaacacgtctgtcaaccctgtcaagccatcgaccgatctatggtcagagtggggcgctgggggcggttgcaggagcaaccaggtactgccgaagccggagaaatcggcaatctgtcagttgagaagcgtaacacgttgctacccattgtttcgggtacgctgcgacggtgaccccatgggacacccgaccagttttgcgatgcggttaccgagaacgcaagcgcccagtgatatgggcgcagtttgatgggtgagggcgaatggtgcccgtgatcatccgtcccgatcagcgtttgctgccaaacagcccggactggagccttccagatccgggctgcttttttttaagttcagtcgcccagcgactttccagtttagaccgggccagtttagaccgggccacgttagaaggcgccacgggggacgcggcagcgtgccccctcacacacggcgcgcatcggatcaccagtgaccggtgttttccatgctggaccaaggctctgccggtggaagtgcatcccccgcctgcagcaattcgatcgagatattgtcgggtgagcgcacaaacgccatccgcccatcgcggggcggacggttaatgacaacaccgttgtccatgaggtgctggcaggtctcgtagatattgtcgacttcataagcgaggtggccaaagtggcggctgtcagacggcagttcgtcgtcgccatcccagttccaggtgagctcgaccggagcctcctcctggccgggaggggccatgaagatcagcgaaaaccgtcctgcctcgctgtcgtagcggcgggtttctttgaggccgagcagcgcatagaacgccatggatttctccaggtctttgacccggaccattgtatgcagatacttgagtggcatgaaggcatccccttgcatttgtgcgaattcaacgcccaacctaagccgcgcgtccagaatgtcgagagcgcgcgtaaaccgcttggaactctgcgatgctcgggctatcaccggagggcagacaggaggctcgcacgatgcagcagtatcatgacgctttgcagcatattcttgatcacggggtcgagacgacggatcgtaccggcaccggcactctgtcgtgttttggaatgcagcaacgttatgatctggccgaagggttccctttggtgacgaccaaaaagctgcatctgcgctcgatcatacatgagctgttgtggttcctgtccggggatacaaacataagatatctcaaagagaacggtgtttcgatctgggacgaatgggcggatgaaaacggcgatcttggtccggtctatggctaccagtggcgcaagtttccacgactagagctcgccgagggcacgcttggagatgagccactctatcgggcaggcacggtggatcagatcagcgagctgctggatatgatccgcaagagccccgacagccgccgtctgatcgtcaccgcatggaaccccggcgatgtgccggatatggcgctgccgccctgtcacagcctgtggcaactgcgcatcctgggcggcaagatgcacctgcagctctaccagcgctctgcggatatgttcctcggtgtgccgttcaatatcgcttcatatgctttgttgttgcacatgctcgcccatgtgaccggctatgaggtgggcagttttgtgcatacgatgggggacgcgcatatctattccaaccacatggaacaggtgaaactgcagctctcgcgcagccccaagtccctgccgcagctgcgcattgcgcgcgatgtgtcttctatttttgatttcaaatacgaggattttgaaatcctcggctatgatcccgaccccgtcatcaaggccccggtcgcggtctaagacctctcagttcaggcaggattccccatgatcacgcttatcgtcgcgcgggcgcgaaacggtgccattggcaaagacaacgacatcccttggcacgcgcccgaggatctgaaggcgtttcagcgggaaacgctgggaggtgcgatcatcatgggccgcaacacctgggacagtttgccattcaagccattgaaaaacaggttcaatatcgtcgtgtcctcaaacccggatgcggcggacaccgtggtggccagtcttgatgaggcaatcgatctggcccgaagcgaaggctacgcccgcctctatggtatcggcggggccgggatctacaagggcatgctggcacgagctgatcgcttgatgattaccgaagtggaccttgaaatagatgatgccgacgcgtttttcccggagtttcctccggaggagtggcgtgtcaacgcgacgctgcctcttcgtgcagaggacccggcctgtgtcttgaccgaatatctgagattgcctcgcgcacagggataatctgcagcagaggtgcatggaaacgaccgcgcccaaaccacacaacatggcctggacgcagtggagttttttgggaaagggcctttagagtgggcgaatgtcgccggccatttgtcggccgtcccggccttcggtcagctcatatcccactttctgattgtccgccaaaccggtcaggccggagcgttcaacggcggagatatggacaaacacgtccttgccgccttcttcgggttcaataaaaccatagcccttggtggtgttgaaccatttcacggtgccagtaggcatgtcccgtgtctccttctcacttgcacttcactttgagcatgctcaaagtaccttccaaccgcctgagcggcgcgaatgaacgctgcgccttcaggtggatcaaagcctttggataccgcaggcccatttcagtgtggcacgcggtttgtaaaaatcaaaggaaatcggtgagactctaccgtaaattgtgagaaacctgcgagcacaaggagaagctgaagtgaagctttatggtctgaaaacctgtgatacatgtcgcaaggcgctgaaatcactgccagatgccgactttaaggatgtcagaaccgagggggtgcctgcagacatcatggcgcaggcctatgctcaatttccagacaaactgctcaatacgcggtcaaccacttggcgcggcctcagcgaggaagatcgggcaaaaccgccacttgaactgctggcagaacacccgagtctgatgaaacgcccgttgatcgaggcagaggggcagctccatctggggtggaccaaagacgtgcaggctgcactcggtgtgacctgacacgcggacctgagacaacgaagcggcgcctatgggtcaatcacaggcgccgcagatctgaagggatttgaaacctgtatcagtcctgagcgtgatgatggcgggcgcgcagcaccgcatccacagagagcgcacctgcgcctttcaccaccagatagctgagcacaaagacccacagcagacgttggtccatgatgacactgtcggagaagcgatcaaaccaggcgcccagcgttttggtatccgttgcaccatgcccgtagacatccgtgagcgactgcaccaccacaaagccgatcatgccaagcgaggcgatccgcgtggccaggccaatcacgatcagaagcggcagcaggaattcggcgtaagtgcctgccatcacgacaacccactgcaacagtccgaactgggacacatcgtagccaacggcctcgagttgtttgggaaagatctggctataagcaccgatcgagggcgaaaacagcccaaagaggccatcgcccagcttggtgagcccggagttccagtaatagagcagcagcacagcggcaaaagtgaaacgggcaaatagcggcatcagccagtcgcccaagcgctcaaccaggttgaacacggcgttatggagagaaatcaacgcagtcatgggaagtcctattgcgagaggtctgtgagggccaagccctcgatcaaaagcgtcagggggacgctgaggtcaaattcgggaaaatcatgtgttgcggcttcggtggcgtccccgagggtctcgccggcctgaagggctgaaatccaaacagcgccgcccttggggagcggctgggcgatggggtcaaaatccggtcgggtaatcaaaacatcctcggcctgcggttgcggctttggggcgctatcctcggtgttgtaccgccagatcgcgtggattggccaagacgagcgcagcactgtcattgccggagcaaatgtcagccggctttgcatcagagcctcggacgagagcgcggccagccttgctggatcaagcggcgcggcatcagcggcgtggtagctctggcgcagagccaactccagccgggccacatcccccagataccccaaatgcgaaagctgcggcatgccctcgataaagcacggaaattcagcgccatagtgcatcatcagcgggcttgagggggggtgggcgcgcaggaaaagtgcggccaatccatccatgttctccttgccgaggagctttgcgatgaccggaaatccctgatgcagcgcctctgtcagggagacggccacattgttgcgatagacgctgaagcggcgcccggcgggccgcgctgcaccgtccaacaacccgtccggtaccggtagacgggcgtcgaggattgccgtggtgaactccgcttcgcgtgtcatcaggcggccactttcgccgtccgcagcgcgttcgctgcgcgggctgcttcggcttcgagcaccgaccattcggggacatccgtgtcccattccaccagcgtgggctttgggccagatcgggtgagggtataggacaaaagggaccaaaccgggtcgacaacttcggcgccatgactgtcgataaggagcgggcgaccgtggtcatcctcgtcttcatcatgcccgccaagatggatttctcccaccagatcaagcgggtaggcatcaatatagtcctgcgggcgatagccaagattggtggcggagacaaacacgttgttcacgtccagcaaaagcccgcagcccgtgcgtttggcgatctcgtgcaaaaaggccggctcttcccatgtgctctcggcaaaggcgagatagcttgaggggttctccagcagcatacgccgccccagcagggtctgcaccatgtcgatgtgatcgcagatccgcgcaagcgtggcatccgtgtagggcaggggcagcagatcgttgtagaaatgcgtgtcgtgggtggaccacgccagatgttcggagaagctcgcgggcttcagccagtccacgagatgtttgagccgcgcaaggtgttccggatcaagcggtccttcgccgccaatggaaagcccaacaccgtgcacggagatcgggaaacgctcggcgagatgacgcagctgcgccagcgggcgaccgccgtcgcccatgtagttctcggcgtggatctcaagccagtccaccgccccggagccatcaataatattctggaaatgctgaggcttatagccaacacctgcggcgttcggcagctgggaaaaatcggtcatagcggacctcgtggggatcgtaaaaacgaagagcggtaaggtgtaggagaggccgcgtctcgttgcggcgcatcggcaacaggcaagggcgccgcagcgcccctgccaaggagtctgtgatggcttaggcttaggctggcaggtcgcgctcgagcggctcgagcgagcctgcgcgtgcggtgccatctgccatcgccggcagctccatctcggtgcaggtgccagagtcgacgagcgtccaggcgttgccctgatagtcaacggtggatgtgcccgcgcaggtggtgccgggaccggccgcgcagtcgttctgaccggccagcgaaacgccatagcatttctctttggcctgagcagaggcgtgcgacgtggtgacggctgtcagtgctgcggcaacggcgcctgcaacggcgagagttttggtggtggtcgacatacgcgtgtcctcctgaagtgataggcgtcgtcttgagtgacaaatacagactaaccgcgaatgaaggcacaaaggaactcacgagcgcgtggctcacgcctgcgtcagtcgatgttagagagaacccgcgcgtttggtgccaaattgctgcgatttctggggttttgaaacaaaacggcccccgagtgggggccgcctttgttcaaaaaccgggtaaatattacagaagatctggcggcgttgcggcctttgccagttcctctgtaacatttgtgaggctctcaaccttggtctgtttctcgccaagacgacgcacggagacggtgcgctcctcaacctcgcggtggccaacggcgagaatcaccggcactttgccaaccgaatgctcgcggaccttgtagttgatcttctcattgcgcgtatcggcctcggctcgcacaccggcggcgcgcagggtctcgaccacttcgttcacatagtcgtccgcctctgacgtaatcgaggcgaccaccacctgacgcggcgcgagccagaacgggagcttgccagcgtgctcttcgatcaggatgccgatgaagcgctcgaacgagccaagggtggcgcggtgcagcatgaccggacggtgcttgctgccgtcctgaccgataaagctcgcttcgagccgttcgggcaggttggcatccacctgaagtgtgccgcattgccagttccggccgatggcgtcggtcagggtgaactcgagtttgggaccatagaaggcgccttcgccttcgaggatctcatagtcgtagcccgcggccttgcaggcatcgccaagggcctgttccatattgtcccatgtctcatccgagccgatccgctgttcggggcgggtggagagcttgatggtccaattgtcaaagccgagatctgcatagactttggagaggaaggcgatgaactttgcggtctcggatgtaatctgatcttcggtgcagaagatgtggccatcatcctgcgtgaagccgcgcacgcgcatgatgccatgcagggcgcccgagggttcgtagcgcgcgcaggagccgaactctgccatgcgcagaggcaagtcgcgataggacttgagcccctggttgaacacctgcacgtggcaggggcagttcatcggcttcagggcgttcacggccttttcgcgggcgtgatcctcgtcgacctcaacaatgaacatgttttcctgatacttgtcccagtggccggacttttcccagagtttgcggtccaccacctgaggcgtgttgacctctacatagccgtcgcgatcctgcatgcggcgcatgtagtcctgaagcgtggtgtagatgcgccatccgttcggatgccagaacacctggccgggtgcttcttcctgcatgtggaaaaggttcatctcgcggcccagcttgcggtggtcgcgcttggcggcctcctcgagcatggtgagatgcgccttgagcttttccttgccggtgaaggccacgccgtagatgcgctggagcatctggcgatcgctgtcgccgcgccagtaggcgccggcgatcgacatcagcttgaaggcatcgcccggcacctggccggtgtgctgcaggtgcggcccgcggcagagatcctgccagtcgccatgccaatacatccgcagcggctcatcgccggggatgctgtcgatcagctcgaccttatagggctcgttgttgtcggtgtaatactggatcgccttctcgcgctcccaaacctctgtggtcacgggttcgcgcttgttgatgatctctttcatcttcttttcgatcgtgccgagatcttcgggggtgaagggttccgcacgatcaaagtcataataccagccattttcgatgaccgggccaatggtgaccttggtatcgggccagatctcctgcaccgcgcgcgccatgatatgcgcaaggtcgtgccggatgagctcattggcctgcgcctcgtccttcatcgtgtggatggcgatggcggcatcctgggtcactggccattgcaggtcccagtgttgaccgtccacggtggcagagatcgcttttttggcaagggaagtggagatgtcggctgcgacctcggcaggggtaatccctgcgtcgtaggaacgtgcgttgccatcggggaatgtgagggaaatctgggccatagtctggctctcctcgtcggtttggcgcccacagaacgcccggttgcgggttatatgcgtctgagctgtttggcggagggcgcggtcaaggtcaagatagaggtttgaaattaaagccccctgggcgaggggcgctgcccctcgcgctccccgggatatttggggttagaagacggggaattggcgaatccctccgccgcgtggcatgggagagagagcaagatttctgggagaaaacacatggcgccgcagtatctggagacctcagagggacgacgtatcgcttatcacaagaccgaagggcagggtccctgtgtggtgttccttggggggctgaagtccgacatggaaggcaccaaggcggtgttccttgaggattgggccaaggcgcgcgggcaggcgttcttgcggtttgactattccggccatggagaaagttcggggcggtttgaggagggctgcatcggcgattggcatgcagatacgcttgcggttgtcgatggcctgaccgagggggagatcgttcctgtgggctcttcgatggggggctggcaggcgctgttacttgccaaggcgcgcgcggaccggatcaaggggatggtcacaatcgccgccgcccctgattttaccgaggatggctattgggccaatttcaccgtggcgcaaaaagaagaactagagtcccagggccatgtcgagctgcccagcgattacatggagccctatattgtgaccaagcgcatggtcgaaaacgggcgtgaaaaccttgtgttgcgggaaaagcttgatctgccctttccggtgcgctgccttcagggcacggatgactcggccgtctcgaccgagacggcattgcggctgttggagcatgctgactgcgcggatatgcggctgacgctggtgaaagacgccgatcaccggttctcggatgaggcctgcctggctctgatcgcatcggcggtcgagcaggtctgtgccggataaacgaagaaatgttcgcaatttgttcctgcttgatgtaaggaaagggcgcgccaagggttttggcgcgtcgtttgtttttaaaggattgaaccatggaacaaaggatcagtttgatcacgcttggtgtgcaggatgtggaagcatcggcgcagttttacgagcaacttgggtggacgcgggcagaaagtccggatggcgttgtcgcctttgatctgatgtcacagacccttggtctttatgcgctggacaagctggcggaagatttgaacttgccgatcgaggccctgggcaccggtgcgatgaccctgagccataacgtgcgcgacgccgaagaggttgccccgcttttggcgcgggctgaggctgcgggcgctgccatcttgcgcccggctgggccggtcttttggggcgggaccatcggctatttccagtcgccagacgggcatatctgggaaatcgcgcataacccctattcggcgctctcgccggagggcgcgttccgctggaatgggtattgaggaagacacacatccttaaccaattttgcgcagagtaaaaaagtccttgctgccccgcactttgggacgtgtagtgaacccaagcgccatacataggcgcattcaatacgggcagatacatatgattgaaccagcgcagttgttggcgcatcctttggtggttgtgcctggattcatgagtgacggacgggtctgggaaccccaggtccgaatgctctcgaggcatgtgccggtcacgattgcgccggtgctcaacgcggatcggattgaggatgtcgcggccacgcttttgacgcatatgccagagaagttcaccgtgcttggggccggcctcggcggatcgattgcgatggcgatgctggctgcgcaacccggacgtatcgcgggtatcgggctcatcgggtcgacgccgctgccggaaaccccggccaaggcggcagaacgtgaaccctggatcatccgtgcgcgcaccggacggctgcgcggtgtcatggaagaggtgatcccgacgtctagcctggcaccgggaccgttgcggcatcagatcatgggacagcttgcggatatggcagaggatctgggaccggatgtctttgtgtcgcaaagccggatgttgcaacgacgccgagatcagcaagcaaccctgcggcgggcctcgcagcctgggctggtgatctgcggcgtgcatgaccagatcacgcctgtgaaacggcagatgatcacggcggaactgatgcagaatgcccggattgagatgatcgaggatgcagggcatgtgccattgatggagcaacccgagcgtgtcagcgccattttgcacaattggatcatcggagatcacgcggtttgccctctgaccggagagctggcagagccggttgatgaacctctttgggtcagtcgccgttcgcggcgccagaccgcagcaccggtgatcgcgcacgcggatacgcccatgcaagagctgtcagaggacgtgttgcatttgtctgcgaattatcgcgcaagcgcttgagatttattgcttgtctgcggtcagcgccctgcgttcggccttggacaacacatgtggctctgccactggtcgcccgctctgaccgtcaaaaaacgcggtttggcgccagcgcccggagacccaggcagaaatcattcgactggccagtttcattgtcatgcgcgccgcgcccttgtgccgtggcggtttccccggttgtggaataaaggcctctgccaccacgcgccctaggcggtcgggttcggagaaaagcgccgtgcggaccgcgatgaagggcagcctcggattgcgcaggccattgaacagcggcgtgccgcaacagcccgcataccaacgatagagccccttgggagacagctgcagcaggtgtagctgatctgcgccccggtcgatcactaccatatccgggttgagctgcagcaggtcgaccccgcttccttttggatccggagacccatgatagagctccactgcacggcaatcggtgcagtggcagcgtaggcgggtgccttgcttgactgaggccgcctcgatgtgaccggagagcgcgccacaggcacaggaaaacccaagcggttccgagggggcgtcagacatgaaaatgccctctatttggctgcggttttcttgggctgtttgcgcacaggttggcgcgcgttggcatccatgaaatctatcacaagcggacggatgttgttgcgccaggaacgaccggcaaagatgccatagtgcccggcaccgggttctacatggcttgcctttttcgagtcgggcaggccggtgcagaggtccagcgctgcaatgcattgaccgggcgcggaaatatcgtccttggagccttcaacggttttcaccgcgacatccgtgatcttgccgatgtcgatcttgtgaccttggacggtaaaggcgttttgggcgatttcgcgctgtttgaagacacgctctaccgtcgagagatagaactctgccggcatgtccatcactgcaagatactcgtcgtaaaagcggttgtgggcatcgtgatccgtggcctcgccgcggcagacgcgcatgatctgctcggaaaaggccttggagtggcggtccatgttcatcgacataaatgaagccagctgcaacagcccgggatagaccttgcgaccgacccctttgtatttgaagccaacgcgctggatcatggtctgctccagctgtcccatggtcacgcggcggccaaaatcggtcacatcggtgggcgtggcgtcagggtccacgggaccgccgatcagggtcagcgaagacggctgcgccttggggtcgatctctgcgagataggcggtcgccgccagggtgagcggcgccggctgacagacggcaaccacatgggtgtcagggccaagttcgcgcatgaactcaaccagatagagcgtgtaatcctcgacatcgaatttcccggccgagacgggaatgtcgcgggcgttgtgccagtctgtcacatagacttcgcagttctcgatcaagcttttgaccatggagcgcaggagcgtggcgtaatggccggacatcggcgccaccaccagaaccttgcgcggctgttcagcgcgatcggtgacccggaaatgaatgagatccccaaacggtttttcgacgattgtgtcgacttcgaccagatggtccttaccatcaggcagggtggttgccgggatgccccagtcgggcttggtcaccatccgctcgaaactgcgttctgtgacctgaccccatgcggccatccagctcagcatcgggttcggcagggcggcattggccggataggaggccatggacagcgcggttgcgccaagccattggttcgcgttacgaaccgtctccatcaggtcgtaggacatcatgtagcgcatgtgcgtctccttggcggtgcttttcgtgccgcggtttgagcccatctttgccgacgcacgccgggagattgggagctgaggccgctttgccgtagaatggcgaagcaagtattctgcacagcagaaagattatgagggtttccttaagatgacaacaacggacaagtctattgaagcttcatctgcggaacagattgaccagcttaaagaaaatttggtgcgcgtagagcaactctccaagcgtttgatcgaagttttggctcagaagaagggtcacaaccccggattggacgctccgaatcaggaacttttcgcgcgtgcagcatcgtcctattgggctgcgatggcacagaaccccacccgcctgcttgaacaacaagttcaatattggggcaagtcggtgcaaaattttgcagaagcgcagcaggccatggcacagacgctggccgccgcgcagaatgaggagggcgagactacagagcgccccgcggtaaacgatcgtcggttcgccaatccgatgtgggagaccaatccctatttccggttcctgcgcgatcagtacctgaccaatgcggaggccatccgtaccgctgtggacgaggtcgaagatctcgatcgggtggatcggcagcggctcggttattttgccgatcagatcatcaacatgatggctccgaccaatttcctcgcgacaaacccggacgctctggaaaaggcgctggaaactgacgggcaatccctgatcgacgggttggagaatctcgtggccgatctggaggccaatgatggcgagttgatcgttcgcctcgccgatgagaacgcctttgagatcggtcacaacatcgccaccacccccggcgaggtggtctatcgcaaccggatgatggagcttatccagtatcatcccaccaccgagacggtgcacgaaacgcccatcgtgctgttcccgccctggatcaacaagttctacatcctcgatctcaaggaaaagaacagcctgatcaaatggatcacagatcagggttacagtctgtttgtggtctcatggatcaatcccaattcggactatgctgatgtcggcatggaggattacatcgaggaggggttcctcaaggccatcgaggtcgccaaggagatctccggcaccaagcaagtgaatgcagtgggctactgcattgcgggcaccacgctcagcctgacgctgtcgctcctgaaacagcgcggcgacaaatcggtgaagtccgcgacattctttaccgcgctcaccgatttctccgatcagggggattttacgcccttcctgcaaaacgattttgtcgatgcgatcgaagcggagatcggcgaagacgggatcatgccgcactacatcatggcgcggactttctcgttcctgagggccaatgatctggtctatggcccggccatccgcagctatatgatgggcgagaccccaccggcctttgatcttctttattggaatggcgacggcgccaatctgccgggaaaaatggcggtgcagtatttgcgggggctctgccaggacaacaagtttgtgaccgacgggttcgagctctttgggcatacgctgcatgtgcgcgatgtggacgtgccgctgatggcgatcacctgcgagaccgaccacattgcggcgtggaaacaatgctatcgcggcgtgcaacagatgggctcgcgctccaagagctttgtggtgagccagtccggtcacatcgcgggtatcgtcaatcccgtgagccgcaacaaatacggtcattatgtcaacggcgatctcagtctcgatgccgacgactggatggagggcgcagagttcaccgaaggatcctggtggccgcgctgggaggcgtggctcaagaaacgttcgggcaagcaggtgcccgcgcgggtgccaggggcgcataaatcctatccggtgcttgaacaggcgccgggcaactatgtgcgtgccaaggcgcgtggataagaaaacgccccgctgatctgatcagcggggcgttttttctttgcgggtgtcgcgcccttagcgcatcagctgcgggcgcacccggatcttgcggcgcagctcctgtggcatatgccggttgagccgcgtgttgatcattccaaacaccgcgatgatcgccagcgtcagcaggatgaaatagaacgcaaggatcgggtaggggacgaacgggttgaaggtcttatccgcgaagtagttcgcgtaatacagcgcatcgcccttttggcgccacgccggaaagcccgagaaatagaccagtgtcgtggcgtggaacagaaagatcgcctcgttggtataggcgggccaggccagccgcatcatggtgggccagatcaccctgcgaaagcggctccagcccgacagaccataggcgtcggcggcttcgaggtcgcctttggggatcgagcgcagcgcgccgtagaagatctctgccgaataggccgaggtattgaggaacagcacgatcagcgcaccaagccaggccgccgagagcggatcaaagatcggtgaaacactcttgagcgacaggaacacgaaataggcaaagaagaactggatgaacagcggcgagccccggaacacaaagatgaacccgtttgccggtgcgcgcagccagcgcttgtgggagttcttcgccaccgcgagggcattggcaaagaagaacccggtgaaaatcgcaatcgcgccgaagtagacgttccagatcaggccggaaccgatcaggacaaattgatcgcagagcgtaaagtcactgcgcggcagcaaccgttcgccaatcccgattgagcgcagcgcataggcctgaaaggtttcaaagcagctcatgttgcggctccttcggctttgcgttgggcttcgccggcgagggtggcctgcccatgggacaggcggcgggaaatacgggccaggacgatttcagagaccttggtaaaggcgaggtagaacaccagaagcccaaggaagtaccacatgcgccagtcgccgtgggggtagtcggtgaagcgggtggtttttgacccgcccagctcgcgggcccaatagacgatgtcttcgacgccgagcaggaacagaagcggcgtcgcctttatcagaaccatccagaggttcgagagcccgggcagagcataaacccacatctgcggcaccagcacgcgccagaaggtctggcggggcgtcatcccataggcttcggcggtttcaatctgcgcacgcggcaccgcgcgcatggccccaaacaacacgttggcggcaaaggcgccaaacacgatcgcaaaggtcaggaccgcgaggctgaagccatagatctcatggaaccactgcgggtcggtattgagcggcatcttggcggcctggcagacgataaagtcgttgccctgccggatcggctcatcccagtccggacatttcacctgatggcgcagccattctatcccctgatcgagcgcgatcacaaagaacaggaagaaggcaatatcgggcacaccccgcaccacggcgatgtagcctttgccgaaccaagccagcggcaggacacgcgaacgtgcggcgctggcgccaaagaaaccaaaggccagcgccatcggggcggtgaccgccagcagcaacagaaccgtcccaaaggacatgtaaaaggcccaatgcttgccggtagtgaggtagcaactcagccactgcaagccctcgagcgtggccggatcagagcaataggaaaaaatggcgggcctcgtcatctgatggggaacgggcgcgaccgcatgcgcggtggcaaaagtggaaagggggccgatgcccccctcccgtgtttcagtcagggatcagggcgatcagaacttgccctcgatctcccatttgtcgagcagctcgttgagcgaaccgtcttctttcatcgaggcaatcgccgcatcgaacttgccgcgcatctcgtcgtcggactgacggaacgccatgccgatgccaccaccgaggtagacgtcgccgaggaagaccagatcggattcttcaacgatcggtgcgaggaagtccttgtcggagagcaccacatcgacttcgccggagttcacggcagcgatggtctcatccggggtggggaattccaccagggtggcgccggtttcggccacatgtgccgcctggatggtgccggactgcgcggcaacaacgcttgcgttcacgtcaacaccttcggacagggcggcgtaagcggagggcgagggcttggtgtagccttcggtgaaggaaacaacttccttgcgctcgtcggtgatcgacatgcccgcgatgatcgcgtcgtagttgcccgacagcaggttcggaatgatcgaatcccagtcgttggtgacccactcgcaggtcagttcggcgcgcttgcacagctcatcgcccagctcgcgctcgaacccgtcgacttcaccggcgtcgttgatgaagttgtagggagggtaggcgccctcggtgccgaggcggatggtgtcggccatggcaaaggttgcggacagtgccagtgcggcagagccaagaagcagagatttcatgtggtaactcccgtttattggtgttggtctggtttttggttattgggcctgtcgcgtggacgacaggaaggcccgcagccgttcactgcgggtatttccaaagatctcgtcggggcagccttcttcttcgatcagccctttatgcaggaacacgatgtgatcggagacatctgctgccatacgcatgtcgtgggtcacgatcagcatggtgcggccttccttggcgagatccttgatgaccttcacgacctcttgctccagctcgggatcaagggcggaggtcggctcatcaaacagcagcgcctcaggttccatgcagagcgcgcgcgcaatcgctgctcgctgctgctggccacccgaaagctgcgccgggtagacgtcgcatttgtcgccgatgcccacctgatcgagatacttgcgcgcggatttctccacctcgtcgcggtcacgtttcagcacggtcagcggcgcttccatcacgttttgcagaatggtcatatgggaccacaggttgaactgctgaaacaccatggacagattggtgcggatgcgcaggacttgcttggcgtccgcgggctggcgggcgatgccgctgccgctccaggtgatcggttcgcccttgaacaggatgtcgccctgttggctgtcctcaagcaggttgcagcagcgcaaaagggtggatttgccagagccggaagagccgatcaaagacacaacgtcgccgcgtttggcggtgatatccacccctttgatcacttccaagtcgccgtaggatttatgcaatccgcggatttcgagtacaggggtgtcgtcggtcaaggttacatcgtccggctgttatataaagtggcccctattggaccaactttccgggcgaatgcaatgcgcaaagggggggcaaccgggcgtaaaacggcaatttcgctacggaaactgccagaaagcgcaatgtgcgcgccaaatgcggcgcgcgctgcgcaggcagtggcgcgcgtggtttcagcgcgcgcgggcaagacggtccatcaccagtgtcggacccggtggggtgggcactgcaaggtagtcgctcggggtggtcgagacgatcttcttcaggtgcagagtctcgcgatgttcaggctccagcgcctcgagcgcgcgctccatcgcggtgcgcaggatggtggcatcctgtgtcagcgcagtgatgaacggcagcgccggtgtcggctcggtgcgttccagttcgcacaggcctgccatcaggtccggctcgtagtccagcagcatctgataggtgagcgcatcaagactggcaaaatccgcacgcccttcggcaaccgcgactgccgaagcctggtggctgccggtttcgatcagctcgccgggaagcatatcgtctgcacgcatccgcatcatggccgccgcccagccggactgcgacagagagtcattgtaggcaaagcgggtcccggcaaaatcccgaaggggcgttcccttgcgatcggctgcggcgatcaagacgctgttgtaatgcccctccggacagcccggcaggccgtaatcgggggtgcccaccagttccacatcgccgtagaggcgcgcgcgatacggcagtccacaggtctgcgccagcaacagatcgggcgcgcgccagacctgccacagatccatgtcgcgtgtcaggctctcaggcccgtggccgagttcggcgcggatcgcggcccagaaggcatcatttgcagcagcggtttcggggcgatcatacatcggcaaagaggcaatcatgcgtgggcctccgcccgtttgcgcgccatggcgctgtccacgtcattgacacccagaagattggccgccagtcggatcagggcgtcttcctcgacgtcacgcttgccatccgacagcgcgacctcccacaaggtctctaccacgccggtgcgctcctcataggggacaacctctttgatcgcgcgggtaaagcggaccgtgtccggagcctcagcttccagcccttcgccctgttcgcgcaggatctgggctgcacccgcatccagcgcaaagcggctgcgcaggatccggtcgatccggtcccgctcggagtcggaatagacattgtcggaacgcgccagacgcaccagcagtgccgtcagtgcgagccgggcatcctcatctggtaagatcgacggagcaggcgccaatagcttatccaaaaagtccttgaatatcatgcgctttcctactccgttggttgcgtggccagcttggcgcgggcacgatcacgcgcccgtttgttgtcgatcaccgacagccccatggccttgcaggcgtcttcgacgatccggatttcgccctcgtgttcgcggttgtccgccagaaccacttcccagagcgcatccagcgccgccagccgttcttcaagcccggtcgtctcgcggatcaggcggccaaacgtgtccgtctcaggcgctgcggcatgcagcttctcacaggtggcgcgcaccttggcggcctccagcgcattgtgcccgtacagacgcgccagaatgcggtcgatcaggctgatttcttccagaagataggcccggtcagactgtgcgatccgcaccagaagcgcaccaagcgccagttccgcatccgggtcgggcaggttcgggctttgcggcgggcgaaaggcctgaaacagcttcttcagcatcaaaaactccttttcggcggcgtcagccgtcgtagccttcgactatttccatatctccggtcgaaaccggatctctgagcgccttggcctcttggtaggcgaggctgtcatagcaggccttggccgtcgcaaaatccttgaattcgatcacaacggtgcgcgcacgcgtctgtccttcgcgcacctctttggcgccgcctcgaaccagaaatcgcgcgccatactcacgaaagggggccgcgttggcgtcaatatacgccttatagcgctccatgtcgtcaatatcgacatgcgccacccaataccctttggccattttcgttccccatgtagtccgggccggtgaccggcctctcgtgttctgcacccaagctgtaccagatcccgggctttggcaatcaccacctataggcgattgatgataatttcacggggaaagcccctctgccagtcgccaagatgcatgacagtgcagacaaaaacgcccgaaccaagggcccgggcgtttcagagtgtgatctgcgggtcagccgatttcggcaagccgcgagagcgcctctttgagcttggtctcttcctcttcgcgcgcggcgaggttttcgcgggcttcctcgaccacctcttcgggagcggaagcgatgaacttcggattgttcagacgtccgcgcagaccaccgagctccttggcgagttttccaagcgatttttcaagccgggccttttcgccgtcgatgtcgatgatgtccgcgagcggcagcaggaacgacgcccccggcgcagagatcgacacgcagcctttgggggcggtctcgattttggacaggctctcaatccgcgccagacgtttgatcagcgtctcgttggcctcccatgcggcctgaccggctgcatcaatctccgtcacgagcatctccacatagagcccagcgggcacatgcatctgcgcgcgggcggagcgggtgttctcaatgacggaaatgacccagttcatctctgcatcggcttcgggctttaccagatcggcggccttgtaggtcggccaatctgcatgcaccagcatcttggcgcgcggtccggtggcgccccagagctcttcggtgatgaagggcataatggggtgcaagaggatcatgcactgatccatgacccagcgcatggtggcgcgggtttcggcctgcgcctcggtgtcatcgccttgcagcagcggcttggagagctcgacataccagtcgcagaccttgccccagacaaagccataaagcgcttgcgccgcgtcgttgaaccggaatgtttccatcgcctcgtccaccgcttcgcgcacgcgggcggtctcgcccacgatccaggcgttgacggccgccttgggggcaaggtcgtccacggtcaactgcggtacggcgtcggtaaagacctcgttcatctcggcaaaacgcacggcgttccagagtttggtgccaaagttgcggtagcccgcgatgcgctgcatatcgagcttcagcacgccgccaaggctcgccatcgccgcattggtgaaccgcagcgcgtcggcgccgtattcgtcaatgatctcaagcgggtcgatgacgttgccggtggatttcgacatctttttgcccttggcatcgcgcacgaggccatggagatagacggtgtcaaacgggatctgatcgacgacggcaagctgcatcatcatcatccgggccacccagaagaacaggatgtcctgaccggtgaccagcgtcgaggtcgggaagtacttggacgtctcctcggtccattcgggccagcccagcgtgccgatcggccagaggccggaggagaaccaggtgtcgagcacgtcggggtcgcgacgaagttgaaccgattcaaggatcaccgcatcgggggttgcaatgaactcaaagccatcttcgccgatggagacctgtacatcttcaccatagtagtctttggcttgttgaagaatctcttctttggatgcaccacaaaatgcctttgtggcgactttgtttttgtcaaatggatcaggcagatctttttcaggcccgtaccaaaccgggatctgatgaccccaccacagctgacgtgagatacaccatggttcgatgttctccagccagtggtaataggtcttctcgccgctttccggcaggattttcacatcgccattgcgcaccgcatcgagcgccgggccaacaaccttttcggcgtcgacaaaccactggtcagtcagcatcggctcgatcacgactttggagcggtcgccaaagggctgcatgatcggcttgttttcgaccatcgggaccacctcggacacctcggtctcattgccctcatcgtctttgacggttttagtcacggtctgcatcaccgccagaccctcgtcggtgatttcctgcaccaccagcttgcgcgcctcaaagcgatccagcccgcgcagatgatcgggcacgaggttgattgcatctacctcgttttcagtgaacgccgcacccttcgcgtgggcttgggcctttgccgcttcttcggcataaggcgcaccatcagcgcgcattgcgcctttcatgtccatcagacggtacatcgggatgccgccgcgcttggcgacctgatagtcgttgaagtcatgcgcgccggtgatctttacggcaccggaaccaaaatccttgtccgggtattcatcggtgatgatcgggatctgacggcggtgctccttggggccgaccgggatttcgaccagcttgcccacgatcggcgcatagcgttcgtccgaagggtgcaccgcaaccgcgccgtcgccgagcatggtctcggggcgggtggtcgcgatggagatatagtcgcgctcttcttcgagcgtgacgttcccgtcctcgtccttctcgatgtaggtataggtctcccctccggcgagcggatatttgaagtgccacatgtggcccgcaacttcgatgttttcgacctcaaggtcggaaatcgcggtctcaaaatgcgggtcccagtttaccagtcgcttgccgcgatagatgaggcccttgttgtacatctccacaaacaccttgatgacggcgtcgtggaagttgggcgagttttcatggcccgtgcgggtgtccccctgcgcgcccgccatggtgaaggcggtgcgctcatagtcacacgacgcgccgaggcgcttgagctggttgatgatggtgccgccggattgctctttccattcccagactttttcaaggaatttttcacggcccagctcacggcgtgaaggctgctgagtttcggcgagcttgcgctccaccaccatctgcgtggcgatgccagcgtggtctgtgccgggctgccagagcgtgtcatagccctgcatgcgtttccagcggatgaggatgtcctgcagcgtgttgttgaacgcgtgccccatgtgcagaacgccggtgacattgggcggcgggatcatgatgcagtaggtcgacgcgcccggtttggcatttgcgccagcggtaaagcagcccgctttttcccaggcgtcaaacaggcggctctccgcctcggctgcgttaaaggtcttgtccagtgccatatcagatgccccgtgcgtcacgtcttggagtatatatgtgcaggccatcgcccgcggttgtccttccaataacgaatgccgccccaaagggaaagtgtcgaacccacagcggggacttgcagaattttctttgtcggcccgcgctgataaccggctcttaagtcttatttgaaataaaggtcatcaagggacgcagcccaccccactcaccactcccaactgcgtgcccccctcatagaaagtctcggctttcgtgcccggtcaggtctgacgcgtatgccgcgaacctgtccgggtacacgagtttctgcagctttttcaggcgagccatacgcttcgtgtcatgacctgacacggcgatacacgtgccagctgactcgcgtcctgtttagcgatctcgtctgggcgccccgtattctcggtgtcgagtgggtgcttcagggcgagaagactcccaatcaagtcagagtttttgctgcacttgccttagatgatcgcaggtgggcgtctacaactcacgttgggttttagaccggcgagcattctcagctttgaaggtcaaagcaaaagggcgcgctcccgcccctttgcgggtgccctgtcgggctcccaaaagcgttgggccgagcaggcgccgtgcccagggggcacggcgcctgcgccaccgcgatgcgcctcgcgcagcgcaattcctcaaatggtgggtacgaccttgagcgccttcgacggcgccagaaggcagaaatttcttacaccacgggcgcgggatcactggacaagcctgtcgcgcacagtaggctccgcccaagctgagcgcaggcaaagggagccatccgatgaaccaacgggtcgaaaaatttgggaagagtcagccgctcgcacgggtggaggaccagcgtctgctgaccggacaggggcgctacatcgaggataccatgcctgcgggggcattgcgggcctatgtgtttcgcagccccgtcgcgcatggcgagatcaccacgctcaatgtcgatgatgcgcgcgcagccgaaggcgtgcatctggtgattacgcaggccgatctggttgatgcggggattgaggccacgcttgatggtgctttggtcaagaatattgacggcagcaaggctgcagctcccgaacggccggtgctggcagggcaccgcgtgcgctatgtcggggagcccgtggccgtggtcatcgccgacaccatggatcaggcgcgtgacgccgccgaattgatcgagtttgactacgaggatctcgacgtgaagctagatctggccgcaggcggcgcagagattcatcccgaggcacctcagaatcgcgccttcaactgggggcttggcgacaaggctgcaaccgatgcggcctttgaagctgccgctcatacggtcagcctgcaggtcgacgacaaccgcatcatcgtcaacgcgatggagccacgcggctgtcacgccacctggcaggatgggcgcatgcatttttactatggcgggcagggcgtctggtccatgaaggagcagttggccaagaaaatgcatctccccgccgaagatgtacatgtggtgacgccggatgtgggcggcggctttggcatgaaagcaatgccctatccggagtattttgccgtcgcctatgcagccaaggtgctggagcggcccgtgggctggatgtcggatcgcaccgaagccatgctgagcgacaatggcgggcgggatctcacctctctggccgagctggcctttgacgcggatctgaagatcacggcttaccgcgtccatacgcattgcaatctcggcgcctataactctcattttggccagcccattcagacccagctgttttctcgggtgctggcaggggtttacgacatccagaccgcgtggctcgaagtggatgggatctataccaacaccacgcaggtggatgcgtatcgcggggcggggcggcccgaggcgatttatgtgctcgagcgggtcatcgaccgggcggcgcgcgatcttggcgttgatccgatggacctgaggcgcaggaacttcatcgcgccgcaaaagtttccctacaagaccgtcaccgatgagacctatgacgtgggggatttcaacctcgtgctcgaccgtctcatcaaagaatcggatctggccgggttcgaggcgcggcgcgcgcaggacgcggcagaaggtcgttaccggggcgcgggcctttgttactatatcgaaagtattttgggcgatccttcagagactgcagacgtcgagtttctggaggacggccgggtgaacatctatgtgggtacgcaaagcaacgggcaagggcatgaaactgtctttgcgacgttccttgcggaccagaccggcatccccgtcagcgccatttcggttgtccagggcgacagtgaccgcatcgccaagggcggcgggaccggcggctctcgttccgtgaccacacaggccaatgccacattggccaccgtcgacaagatggtggccgccttcacccccttccttgccgaagaaatgggcgtggatgaggaggctgtcgactttgatggtgagaccttccgcgcgccggggtccaatctcaccccgacggtgcttgaggcggctgacctggcccgtgaaaaggggcgcgtagacctgttgcgccatcaggccgaagcatcactgccgggacgttccttccccaacggggcccatctcgccgaggtcgtgatcgaccgtgaaaccgggcaggcccgcgttgaccgctatacggtggttgatgattttggaaatcttatcaaccccatgctggccgaaggtcaggtgcatggcggggtcgctcaggggctagggcaggcaatgcttgaacatgtggtctacgacgcggatggccagttgctcacggcaacgttcatggactacgcgatgccgcgcgccgaagatatgccttgggtggatttcacctcggagccggtgccatcgacgcagaacccgatgggaatgaagggctgcggcgaggcgggcacggttggggccctcgcagcagtggccaatgcggttcaggatgcgctctgggatcagggcatccggcaggtggatatgccgttcacgccggtcaaactttgggagttgatgagggatgtttctcaagcggctgagtaaatcagttctgggagtgttcgggcggcgtcggctgctgtccgcgcactcgtcagagaccgcttcgcgcggtccgcaatctcatgtgatcatccttgacggcactatgtcgacactcgaaccggggcgtgaaacccatgcgggaatggcctatcggctctgcaaggaaatggggccgcgggtctctgtttattacgaggctggcgtgcagtggaacgcctggagcaagaccgccgatgtgatggttgggcgcggcatcaaccgcaagatccgcagcgcctatggctatctcgcctcgcgctatcgccccggcgacaagatctatcttctgggctactcgcgcggcgcctacgcggcgcgttcccttgccggcatgctcggcgcagttgggctggtgaaaacagaacacgccaccgtgcgccacatccgcaccgcctatcgccactaccagatgggaagcggccatgaggtacgacaagcctttcgcaacgctcattgccacccggagatccagattgagatggtcggagcctgggataccgtgaaggcgctgggcattcgcctaccgatcctgtggcgctggtcgcaagtgcaacacgcgttccatgatcagaaactgggggatcacgtccgggcgggctatcacgcgttggccatggacgagacgcgcgaagcctatgcaccggtgctgtggcaaacctcgccagactattcaggccagcttgagcaggtctggtttcggggctctcatggcgatgttggcggtcagattggcgaatgtgacgccgcccgcccgctggccaacctgtcgttggtctggatgctggaacgcgcagagatgtcgggcctgccgctgccgcgggactggcggatgcgttttccggtggatcccgatgcaccttcggtgggcacatggtcgggctggggcaagatctttctgatccgtagccgacgcaagatcggtctcgacccgagtgagcgcgtgcatcccagtgttcagatagcaaaaaagcccaacaagacagccgggtggctcggtatctttatgcgccaaacccgcctctaggcgccgcagtgcaggcctgttctagagctgtactggccggagcgttttgaccatttctgtcgccgttgagaacccaaaaagcggcgccagaataccaagctttttctcatggccggggacgaagccttcgcgctcatagagcgctcgggcgcgcggattggtgtcgatgacatcaaggcgcaggcgctgcaatccggcgctttcggcacggttcattagcgcgtgcagcaatttggtgccgaccccgagtccgcgggcctctggttcaacaaaaatcccgtccatcagcagtgtgccctcttcgcagtcgcgttcgagcgtgtggatcaacagtccgcgccaggttgcgccgatggagccatagacgcggctcagatcgttgaaatgcccgccgataaaactgccagtcgacgtcttgaacccggccgcaccgagaaaatcgccggtgtctgaaaccgcgctgagggcgtgctccgggtcgatcacgcgttcaaaaaaggccatcgccttggaagcgggccccagcgggtagcgcagtttgcgtgcaaaggcctgccaatagccacgcgctgcctgggcgcgatgctccgggcgaatactggcctcaatcgagactttttggcccatctggtttgagttcgccatcgtccctccctaagtccagagagatatggatttttacaaggttacattcaattgaagccgagagtttttattgccgcggcgctctgtgctgcattgcttggggcgtttgtgttctggcggctactcgatcacgatctggagcgacgcgctcagacaacgtttgagtttcgcaccctagagggacagatcgcggggacgctctggctgccggatgagccgttgcgggcggcggtggtcttggtgcatggcgatggcgctcaggatcgcacagcgagcggcggatatgcgccttttatcaacgcgctcctggatcgcggcatcgcggttgcggcctgggataagcccggcattggcgcgtcggagggcgactggcaacaacaatcgatgcaggatcgtgcgcttgaggtgcgcgtggcgctggcgcagcttgaggcagcgatcgcggaggtgcccatcggtgcccttgggttttcgcaggcaggctgggtgctgccgaaacttgaaccgggggctgcggattttctggttttggtgggacctgcggtctcatggcaggcgcaaggcgcctatcacacgcgggtccgctttgaacgcgcgggctacacgcgcgcggcgattgcgcaggcgctggaggcgtccgcagcgcaggacaaaaccctgtttgcccatgatattcccccgtcgccgctgccagcggggatgacacccgcgcgctggggctttattcaggtcaatcgcaacagcgatgcaagcgccgatcttgcagcccttgaactgcccctgatggcaatctggggcgcgcaggatctgaatgtggacgcggttcgggactttgatcgttaccgaagcctgcgcgcggcagcggcggctgagaccaaattgcagctatggccagaagccacccatggcttgctacgcgcaaaaacatataactatcagagctttgatgagtggtcgtggtttgcgcatgcgcgctttatgctcgcgggacgaggggcctatgcgccgggggcgctggacgcgatcgcggactggatcttggctagatcctcctgagctataggccgacgcatcagggcgcgactttcatcacgatgcaggtggttgatcctgttgcatagagcttgccatcttcgacaccacggatttcgccatgtgcgatcccggtcgtgcgcccgacgtggtcgatttccccccagcagtcgatggacatgccaagcgggatcgagcgcagaatgttgatcttgaattccagcgttgtgtagacggatcccttgggcacccgtgtcatcaccgcgcaggccatggcgctgtcaagaagcgtgccgtaccaacccccatgcaccgtgcccatcgggttggtgacattgaattcaggtgcgccgcgaaacaccacgcgcccgggctccacactcttgaggctaaagccgagggtttccccgatcggcgggccgggcaggcggccttcaaggatggccgtcatgaagtcgagaccggagatctgggcgaccttttcgatcggcaacagatcagaaggtgtttccgcgacggccatggcgtcctcctgaatgcatttcacaaacgttaggagggcgccacaggcgtaacaagcgttacgcgacgttctgaaggcgtgccttggatttcacaccgagcgcgtgacacacatcgcgggtaagttcagggcggttcagcgtgtagaaatgcagcttcttgacgccgccatccaggagttccgtgcagagctcgctgcacaatgctgtggcgaggagatcgcatcgatcgtcgcggtctgctttctcgaacgcctcgtccagccaagccgggatcgtggtgccgcaggcctctgcaaaacgacgcacgcccttccagttttcaattggcaggatgccgggcgtgatcttgtcagtgtcgatgcccgccttggcgcaggcgtcgcggaaccgaaagaagctctcggcctcaaagaagaactgcgtgagcgcctcatcggcaccggcatcaagcttgcgcttgagccattctacattggccgcttggctggcggcttccggatggctctcggggtaggcgccaacgcgcaggttgaacttgccggttgcggcgagcgcctcaatcagctccaccgaagagttgaacccgtccgcggtcggcgtgaaacgaccttcttccttgggcgggtcaccgcgcagggccacgatgtcggttatcccggctgctgcatattggtctgcgatatcaagtgtttcctgtcgtgtcgcagaaacacaggtcaaatgtgcagccaccttgaggccggaattcttgtgcagggtcgtcaccgcatcgcgggtcagctcgcgggtggtgccgcccgcgccataggtcacagagacaaaacggggcgccagcggcgccagtgactgcaccgtgtcccaaagccgaaaagaggcttcgaggttcttgggcgggaagaattcaaaggaaatctcgggcgtggtcactgtcggtgctcctcggaggcggcgcgcgtttcacggcgggctcggaatgtcgtgttttgcgacacatgtgtcgcttcaggtttgaccccttttcacatgagagctatcagtgaatcaaattcatatttctcaagaacaacatgaggcagatcgcagtatgcacatcgagtttcgtcatcttcggaccatcaaggcgatccacgaggccggtgggctggcgcgggcggcggatcagctcaacatcacccagagcgcgctcagtcatcagatcaaggggcttgaagagcaggcgggggtagagctgtttttgcgccgctcaaaaccgatgaagctctctgcggcgggtctgcggctgttgcggttggcagagcagatcctgccgcaagttgagtctgcgcaagcagaatttgccgccctgcgcgagggcgaggcggggcgtctgcacatcgcaattgaatgccacgcctgttttgaatggctgtttcctgtcctggagggctttcgcaaaagctggggggatgtggatgtggacatccgtccgggtctcgcgttcgaggccatgcccgctttgatgcgcgaagaggtggatctggtggtgacctccgaccccgaggacatgccgggggtctcctttattgaactctttgattacaatcccgtgtttgtcgcctctgcccagcacgcgcttgccgcaaagccctatgtagaagccgaggattttcgtggtcagaccctcattacctatcccgtagagcgcacccgcctcgatgtgttcagccagctcttgatcccggcgggcgtggagcctgcgagcatcaggaaggtcgaactgacggcggtgatcttgttgttggtggcctccaaccgcggggtctcggtgttgcctgactgggttgtgcgcgaggtgaagtattcctcggattatgtgacgcgcccgctgacaaaactgggcatcacccgccggctttatgcagcgatccgcagcgaggacgaaagcaaaccgttcatgcaggagctgatccgtctggcccgggtcgaggcgcgcaagttgcagcaggtctagggtggtgggcgttggtccaatggtggctcagggcccgcacaaggtgggggtagcggctcttatgcactgggtgcatggctgaaacttaaccgcaaaggggctcgcccccttggcaactgcgcacagcccgtgtatgggcaccctttgaccgacatctcccccgcaaggacagctcgtacaatgattggtagcgcaaatctcaatgtgatgatcaaggccgctcgcaaggcaggccgctctttggtgaaagatttccgcgaggtggaaaaccttcaagtctccaccaagggggctggcgattttgtcagccgcgccgacattgccgccgaaaagatcctgaaagatgaactcctgggcgcgcgtccgacctatggctggctggccgaagagggcggcgaaatccccggcgaagatccgacccgtcgctggattgtggacccgctcgatggcaccaccaacttcctgcatggtctgccgcattgggccgtctctattgcgcttgaacacaaaggcaagattgtcgccggtgtggtctatgacgcggccaaggacgagatgttctttgccgaaaaaggcgcgggggcctggatgaacgagacccgtatccgggtgtctgcgcgccaccgcatgatcgagtcgatctttgccaccggcctaccgtttgccggtcgtgccgatctgccggagactctgcaggatctggcccgcctgatgcctgcttgtgccggggtgcgccgctggggtgcagccgctctcgacatggcctatgtggccgccggccggtacgaggggttctgggaacgtcgcctaaacgcctgggacctggccgccgggattatcatcgtcaaggaagccggtggtctgtgcgaagcgctggatcccagcgagtcgatcatcgaaagcggcgaggtaatctgcgcgaatgaacccatttttgagaatttcaccaaggtgatccgcggctaagctgttcgagaccctgcagatctcggatgtgcagtgaaagcctcacaccccggtcgccgatgggcgcgccggggtgtttttgttttggaccgatctgcgccgtctcggattgagagcgctcccggatgcctccggcggggatatttggagttagaagaaggcagtgggtggtcaatcaccatcagtgtcggaggggtgattgacgccatcgcgccaggggatttcgccgtagatctcggcgtgggtgcgcgggtttccggtgtcgatgcagccaaggtttacaccgcattctgcggggttggagcggcgctggtgatagacgtagatgccgcaggtcttgcaaaagtggtgttgggccgtgtgggtgccccaagtgtagaggctgaggttttcggcaccgcgcaggatctgcaggctctctgtggtggctgtaacagcggctgcgccccggcgcaggcagaaggagcagtcgcagcggctggctgaggcgagaccgtttgggaagcgggctgaaatttcgacggcgccacaatggcagctggcagtatgcgtttccatgggatgctcctttgggggcagtgggttacttgccccaagggccgctgcgaggcggtgtgttgcggcggcggacgcggggaatgcggctggcgctatagctggttccaggatgcggtggatggccctgagtgcgtgaccagaaccgtggccccccgcgtatgatccagagcggcacggtcagggcaaggccgacaaagaaaccaccagcatgcgcccaataagcgacaccgcccaggttcggatcggcgttgaggccaccaaagaactgcatcgcaagccagagccctagcatgatgaaggcggggatcgggatgatgcgaaagaagatgatcaggatgatgagaatatcgacgcgggcctttggaaacatcagaaggtagccgcccatgacgcccgcaattgcaccggaggctcccaccagtggcaccatcgagagcggcgcggaccagacatgagccaacgtcgctcccaccccgcagatgagatagaaggcgagaaacggcaggtggcccatttcgtcttccatgttgtcgccaaagatccacagaaacagcatgttgcccgccagatgcatgatcccgccgtggatgaacatggaggtgagcagcgtgagtgttccttctcccatcgtgatctctcgtgggaccgtggcgaagctggcgtaaaaaagcgcaaggcttctgtcggtgggaaagctggtggaataccagagaaagcccaaaatattggccgccatcagcaggtagacgacataaggcgttcggccggaggggttgtgatcacgcagaggaaacatgcgctgaagctggggcgtcggcgcagggaggtcaagcgaaatgaaaggcttgggcagaagtgctgcccggcgcagaggccgggcagcgcatcgttgtcagatcaggcgttgccacccagaagggctgcgttgcccccggctgccgtggtgtcgacacagacatggcgttcagcgagcacccgcgcgcgatccggcgcgccgggaatgagcggcacaatcggtccctcacgtttggcgaggctctgttcgatctcgcgccccgtgtccgcatcgccccaccatagaacgccagagatcccatccatatgcgccagccggtgcaggtccaccatgccgtcggcctcgatggcgatgccgcccagagacgcgaccagtttggcctgttcagagacggcctcggcgccggggcccgcacagagaagtggcgggcgtgccgagaccgtgaggcggtttgattcacctgtggggccgggcagggaggtggtttcgggatgtccggcttggccgcgtgccgcggggatctcgcccatggtgtctttccatgcggcgtcaacctggcggcgatccggagcacagaaacgggccaggtagttcgggccgcctgctttgggaccagtgccggaaaggccttcgcccccaaagggttggctgccgacaatagcgccgatctggttgcggttcacatagatgttgcccgcgtggatgcggtcgcagacgtgctgtacgcggtcatcaattcttgtctgcaggccgaaggtcagcccatagcccgtggcgttgatcgcgtcgatcacggcatcaagctcgcgcgatttgaaggtggcgacatgcaggacggggccaaagatctcttccttgaggtcgctgatcccgttgatcgaaatcattgtcggcgccacaaaggtgccgctctgtggcgcctgcatttccttcaggacgcgcccctcagcgcgggcctcgtcgatatgggcgaggatcttggcgcgtgatccttcgtcgatcaccgggccgctgtcggtcgcaagatgccagggatcatcaagatcaaggagctccatcgcgcctttaagcatcgtcagcacgtcttcggccacgtcctcctgcaggtagaggcagcgcagcgccgagcaacgctggcctgcagactgaaacgcgctttcgaccacggcctgcaccgcttgttcgggcagcgcggttgaatcaacgatcatcgcatttagaccgcctgtctctgcaatgagaggcgtgccgggggcgcaatgctcggccatggccgagcggatccgcatggcggttgcggtggagccggtaaacgcaacgccgttgatgcgtgcatcacccgtgatggctgcgccaaccttggagccgcgcccggggaggaactgcagcacatcgcgtggaacacctgcctcatgcagcagttccacggcgcggaaggccaccagcggggtctggtccgcaggttttgccagcaccgcattgcccgtggcaagcgcagccgaaacctgcccggtgaagatcgcgagcgggaagttccagggtgagatgcaggtgaagatacccgctggcgctgcatccgggatgcgggaggcataatagcgcaggaagtccaccgcttcgcgcagctctgcgacggcatccatctgggttttgccggcctcacgggccaagagcgcaaagagctcgccgtaatgcgcctcatagaggtcagccgccttgttcagtgcggcggcgcgctcctcagcgggggcgtcccaggtgttggccgaggcaagcgccagttccacgtcttcggcactggattgagacacgctgccgatttcactgagatcgcttgggtttgtgaccgcaacgcgggcctcgggctgtgcttcgcccgcgatcagcggaaccgcgtcccaggtggcctcccggaagggcgcgcgggccttctcgattgcggccaaggttggcgcgtgacgcagatcaaaccctttggagttgatgcgctcgggctggaacagattggggccggtggggatatcggttgtcaggtcatcgacctcctggaacggatcagctgccaccacttgcggtggtacgtcctcgtcaacgatctggttcacaaaagaagagttcgcaccgttttccagcaggcgacgcaccagataggccagaagatcgcgatgcgcgcccactggcgcgtagatccggcagcgcgtcttgttctggtccatcaccatctggtgcagggtttcgcccatgccgtgcaagcgctggaactcataggcctgaccttcttcggccatatgcagaatggcgctgacggtgtgggcgttgtgggtggcaaactgcggatagatccgatcggtgcgcgacaggagtttgcgtgcattggcgatgtaggacacatccgtcagcgccttggaggtgaagaccgggaaaccgtccatgccttcaacctgagcgcgcttgatctcggtgtcccagtaggcgccttttaccaggcgaaccataaagcggcggtcgtatttttcggccatctcataaagggcatcaatcgccagcccggtgcggggcccataagcctgcaccaccacgccaaaaccgtcccaacccttgagcgcggggtcagagatcacttcttcgatcacttcgagcgacagcgacaggcgatcagcttcttcggcgtcgatgttgagccccatcttggccgccttggccagaagcgccagtgccttcagacgcggcaccagctgttgcatgacggactcttccttggcgatctcgtagcgtggatgcagcgccgagagtttgaccgagatgccggggttttcgcggatgtcggtgctggtgcaggcgctggcaatggccgaaatcgcgcgggaataggccaggtgatagcgcgaggcgtctgcctcggtacgcgcagcctcgcccagcatgtcgtaggaataggtatagcccttggcttccatgttcgacgcgcgtttcatcgcactctcgatggtctccccaagaacaaactgacggcccatttccttcatggcgcggcccacggcggtgcggatcaccggctcgcccagccgtttgatggccccacgcagcgcgccgacggggctcttttcctcgtccagaaccttgcccgtcagcatcagcgcccaagtggaggcattgaccagagaggaggtcgacttgcccatgtgcttaccccaatcggagggggcgatcttgtcttcgatgagcgcatcgatggtgtccgcatccggcacccgcaagagcgcttctgcgaggcacatgagggccacgccttcgtcggtcgataggccatattcggcgaggaacacttccatcaagccgggcgaggaatggccacggatgtctttcaccaattgggtggccgaggcacagatggcggagcgatccgcttcggacagagcggccagagccaccagcgcatcgcgcatattggcctgatccaaataggtgccggcatcaatccggtcgcgtaggcgcatatcacgagtcatgagtgttccccttgttaagagatttttccccttttatcgcgtcatcactggtcatttgtcccgattgtcgcaatagtacaggtcaaatgcgcttatttgcggagggtttttgatgcaatcgcgtttcccggggctggaccggttcgatcaggcgattctgcgcgagttgagccacaatggccgcacctccatttccgacctcgcccgtgccattggtctctcaaaatcgccaacacaggcgcggctcaagcgcctggagtccgagggcatcattcagggctaccgggcgatgatcgatccgatccgacttgggctggatcatgtggcctttgtcgaggtgaagctcaccgacacccgcgaggcggcgctggcgtcgttcaatgccgcagtggtgcaggtggccgagatcgaggaggtgcacatgttggcctcgcatttcgactacctgctcaaggtgcgctgccgctcgatgtcggattttcgtgcgattctgggggagaaaatctcttcgctaccgcatgtttcctccacctcgacttatatgtcgatgcagtcggtcaaggatgatgcagggctggggccgatctagcgcgttcccatgagggcttgcctggggctcattccgcgccatttcttcgatatggttatccgttgttgtgtccccgctcttgtgtttttttgtgttggctctgtcgccgtggcatcggaatgtccggctgccccggatcactccggtccgatttccgaattattggaagatgtgcaatccgctgcaaacgagcaggaagcccaacgcatcaatactcagctctgggagtattgggcggatgcccccgatgagcgcgcgcaagagatcctcgatagtggcatgtcgcggcgcgaagtctatgattttgtcggggcgctggcggattttgatcgtctggtcgactactgcccgaattacgccgaggggtataaccagcgtgcctttgttcattatctgcgccgagactttgctgcggcgctgcgcgatcttgaccgcgcgcttgcgctctcgccacgtcatgtcggcgccatgagcggccgcgcgctctcgctgctgggattgtcgcgtatcgcagaggcccgcgaggccttgcgcgcggccctcgatctgaatccttggctgtcggaacgccatctccttgcaccgggcgccccgcttgcggacgagtccatcgacctgtgaccggagagcaagcgccgaaaatcactgactttccgattgaacccacccgcacgcgcaggtagagcttgtggcaattggtccagccgcgcgggcgtggtggaatggtagacacaggggacttaaaatccccaggctttagccgtgcgggttcgagtcccgccgcccgtaccaagctgattttaaacgataaaccgaagatgcgttgagctcttagaagtgtgatcttttcggtgactcacacacccgactcacacagtctcgtttcgttttcgttttgttcgtttagtggaatttcactttcggcgctcttgagcggcgcgtgagagcgctttgcggctggcccgagagcgatagtaagccaccatctctgcgctttggttcgtaacggcttgaatttcggcatcactgcaaccagcctcggcgaggcggatgatagagagtttgcgcaggccatgcagaacgtacttcttcgcctccgggccgagtgcatcgcgccatgtgcgaaatgatgaagagatcgaccagtagcctcggggctctgtaaggttcttcgctaaaacgtaagctccgttgcgtggcgctcgcgagatgaactcgcgcagggctggaggacaataaacatcaatccgttcgtcgctcttctcatcaaggacgctcatccattcgccgtcaaagtgtgcgaacttcatgtgaatggccgcattgggtctctgacctgtccctaggatcaattcagcggcagtgcgcacatgttccggcgcatccttgagcttgtcgaccatccattccggccagggctcatactcgctctgcttaccgaagtgttcaatgcctttcgctggatttggaccgaggggccagtctagtttctcggcgccatagttccaaagaaggctcacggtctgcagatacttgtccgctttcctcggagtttcggacatcttggagtgcgcggttcgaattgcttggcgtgtggttcgcctcacgtccttgtcactgttcttatcaagtatggcttccatcgttctggaatagctgcgctttgttccatccgccaatcgagactgaacacgcggatcttcgcgccacgcggtgataagttgccgccacgtgtacttcgccggagctgtctgttttttgtgtttgccagctcggcactgccaataaagcatgtcgaggcgctcagagtcgccccgccagtccagctttgtcgttcgctgctttctcttgccgccctctgtccagttcacacggtgatagggcacccagatcgagttgcgggtgtcccatttccaaacaagccccggcttgacgatacgtggcttattcgggcgtctcacagttcaaagtcctcgctgggccgggccgcgttgccgtttagtatggcaagcaggtcttcggatttccacctctccacatcatcagcgataatgacgggtttcggcaaagccccgcggctcacaagatcccggaatttggcaacgggcatatcgaggtatgcggcagcgttggcctccctcagggcggcaggggtaacactcaccatcaagcggcctccttcttctggccctctgcgggcttggcgtattctacgacgtgctccagatcgtcccacgtgcgattgatctcgatgagatccccggatcgtatcgcgcgacggtgagcctcaatgcgctggcgtaagagcgtttgcgggctcactgcgagtcctccatctcgataaggtgcgaacagttggcgcgcaccagcgcctcggccactggtgggcagacgctattgcccacgcaccggacctgcacgtccttggggaacgtggaaaaggtccagtcatcgctttcctgcttccaaattccctcgatcacgtagtctgcagggaagccttgggcgttgaagagctctcgcggggtgagcatgcgcataccgacatctacgatgatgaaagcttgcccctcgatctcgagtgtgacgaactcgcgttcatcccaaaggccatggtcgcgcatcaggcttgcgacttggcgggcgcgctccgtatgggcgtcagtgaacggtggagctgggatcacatccgcttggcaatgcgccatgcgatccttgactgtgatagtgtgcagcggagcgtccgcgcgcgctccatcaccggtgccgtaatatttggcgaagaacgcggccaccggcgtctgctggctcccgctgccggtgacggtggaaatcggctcgcggggatcatggccactgtgccccgccatgcgcggtccgccgttttgctgggcgagaaaggccgagaacaggctgttctggtcctttttgctcgcgcagatcgtatgatgcgggtccagcatagagcgattggctccgccctgttgtgcgtaggtcaagacgggggccatgagagcggagtggccgcctccggccagaacggtcggatgaggtgcgtctgcagcacgatcccggcgcgcagtgcctttcaggctcatcaggtggggcgcgcaaagcgtaaggcctgcgccgcccgccgtgacggtgtgggtgggcttcgttacctcctgccaaggcttcaggctgttgcgcatggtggcaaggtacggtgccagcactccaagcggggcggcaccacctgggcgcttgatgaagctgtttgccgggaccgttgcgaggggagatttgatttggtgtccggttccgccagtggtgaaacgtgcaatgctgggggcaatgagtgcgtttgaaacgcctccggccgttacaacgccatatggatcggtcagtgggtattttcgacgaccgccgctatcgccatgcgcgacgctgacaagggagggcgcaacaatcgccttttcgccccggttggcccccgtgattgtcttgaagggttctgcgacgtcctcgacgcgcccgccgtgggtcaggttcaccagaaacggacgctcagcctgcagaacatagcgatgcaggccacgagccacgcgcgcaagcgtgttgtgggccagagggcgcaccgagcgcagtccgtatttttccatgatctcggccttgctgtcgaaaatcgaggggcaagggtgactccagtcgatacattctgctgcggttcgccacggtttgagcttgcccgacttcacctcggcgctgttgggatcgccgtgtgtgggcgtgggccaactgacaggctccccatcaaagcggatcgccacaaataggcgcttgcgaattgttggcgctccgtagtcacagcctcggagttctcttcgctctagcttgccaccaaggctgcggatctttttgcaccacgcttcgaacgtttcccccttgcgctctgggcacggcatcaggcctttgtcggtctcgatcagtggcccccagccagcgaactcctcgacattctccataagaactacgtcgaccttgccgccgctcttctgaatcctttcgatccagcccggaataatccaagcgagatcgcggatgttgcgagctaccggcttaccgcccttggccttggagaagtgcttgcaatcggggctgaaccacatcaggccgatgtgctttccactcaaatgctcaagcgggtcaatgcgatatacgttctccgaaaggtgtaacgcctcggggtggttcgcttcatgtagcgcaagcgctgccggatcatgattgatcgcgatatccggactacggtcgagagcgagctcaatgccagtgctggccccgccgccgcccgcaaagctgtcgacaatcaaggggcgctcgtaaacccgcgctgcgtcaaggaattcaaggggaagctgtgcggtcatgctgcggtcttctctcgcttggtgtgtgcccaggtaaggaactcaggacggggtttcggtaaggcgcgccattcgctgtataggcgggccgcttcgttctctttctcggactcggtgggcatctcagcgaggcacgaccgtgccatctaccttgcgtttccatttgctggcctttgatccgggcagggtgcctttgggcttgtgcagtccgagagacttgttccgcttccgggcctcgactgatttttgcgccacgtcctgctttgttttcagcgagtggcatgggcggcgtaaggcgcgcagattgctttccctgttctcgccaccaaggatcagggcggtttcatgatcgaactcgatagcttcgccagccgcgccgagcttcacgccacagccgcaggcgcagatgccatcctgcgccatgatgatccgtgcctttacgcgagccggggcaggggtggcgtcggttttgccgatccattcggcaacagggcgtgtcatgctgcgctcccgtaaccgcgctcagcggcgcgctggttggcgttcaggctacgccaaaactcgatctgctgtttcgcggcctctcgtagtgcgcgcagcttctcgtattcgccagccacgagagccagctcgttcacggctgagagatactgctggctcgcatatgcctctcgctcttgggccgcagcgctcttttcgtcgctgtgcttcattgccattgccttcaccacgcgaagcatgttttccgctttagtgaggtcggccttggcagcagctatctctgccgcgctatcgatcagatattgagtggctttttgggccttgttcatagcgtcatgcatcagttcggcctcgtgattgtttcggatttcacggcgtcattgaggatgcgaatgctcatgcgaaactcgagcgcaacctctgcaatcagggcgtcatgatctgcgccttgaggcgtgttcatagccgccttctcacggcggaagtattcggcaacggcggcgcgggtggtcatcagtagcccgccgcgagaaagcgcttgtggatctcacgagtgcgccacacatcgtccttgcagtattcagcaattttgtcgtgttcgcctgccgcccatgctgcagccacctgagagccgtcaaaaccgtccttgccctgaattccgaggatctggcagagttcgtccatgctgatgcggttggtgccgccagcccatgcagccattgtgtccacaatagaccggtcccagggttttgggtcgcgagggaagctgcaagacgccggcatctttacgccgagatagatcgcccgcttgcgaagaaacccaatgtcgaacccggcgatgttatgacccacaagcgtttcactgtggtagggatccagatcaccgaagaagtcggctaagatgctccgctcgtctgcagtggtttttgcgtggcgcactgcaacagggccgtcattccttgcccatgcaatagtgcagacgtgcccgcgacctccgtcaaagctggtcttggagagcgcttcgattgcagcgctcttgcggttttcggcaagccacttctctatgctctccggctttttcaggtttgccggaggcttcaccttgcgttcaaggtcgatcaggtagctttcatcctgacatgggatagtctcaatgtcgaagtagacgaaactgtgggaagcgtaggcttcctgaatggcggacatatcaagcggcattgcttttctcctttgtggctttactcggcggccatagctgggctttccggctcgtctgcatcgtcaaactccgggatttcatcgtccaattcgtcagcaagcgccgcactcggatcgacgtactccctcgcttcaggatcgaagtcgaagccaagctctttcgcgcgcgcgaccaccatcttctgaatatccttgcccgccttcttggctcgacccagaacgccgttgatctcctcggcgctggtcatttcaggcagcttggtggcgaaccaatcaatctcagccttgcgttgcacctgctcctcggaaagcgcgttcatgccttccttgatctgggtgatgatgtcggagaggcaggtggcatatgtttctgccgacgcttccggaatgggcatcgcgccaatgttagccgggtcttttccgaatgatgtttcagtaggggaaaagatcaggtgacgttcgcggttgtaaatcgagatgcgtgcgatcacatcgctgtctgtaagcactagatccttggatccgcctgagattttcaagcgctccttgatggcgtctccgtccgctttttcgtccatgtgagagatcagcaccacgtccttgccgaagctgcgcaggagcttgagaaatgcggaaaacctgacgccaagttgcccccatccttgctggttcaaggcaccgccatatgagagtttcgagttcgcgcggatgatatcagccgacagggtgtccagcgccttgcccacagtgtcgatcacaatggtgtcgtaggcggcgagatctcctgcagagatgcctgccacatcgcgccagtcttcgacttgcacaacatctttgcgatcaacggcgcggtgagcgcctttgtcaaagtccagaagcagcgggcgacttgctgtgaaggcgaggctggttttgccaagcccaggctgggaatagatggtgacacaaaggttcttcacctcaatcacctcatccgattttgtaattttcagagtcatgtcgtgtctccttggaataaaaggccccggcggtttcgggttagggaggaggaaaccctcaccgccggggaagttgcggacgcgaagtgatgcgcccgacagggaggttcaataaggctgagagaggctggcgccgactgacactgcggtcaggattgcgacgaagatcatcagcgcccagaacgtcagcgtgagcgtccagttcttctggtcatgattgcgagacgcatttcgctctcggttcatccgttccagatgctttcccatgcctggatgatctccaaggccccggcggcgcgtgctgtgcgtgccgtgagtagtggactttgccgccggggtgcgaatgggggtgacgttggaaaggtggctcatgccgcgccctcccggtcaagagggtagggatctcctacctgtgccagaaccaagcgggctctctccgcgcttctgcggcagctggaggtccgggcgatgtcttccagcgccattgtcagccggttgacctgcacgccgcgctcataagccacgtctgtgacggagttggcgcgcatgcgtgtgtgaacgtcttggtagctcatgtcttcgacctcactccgctgcctgaatgtgctgttttgccgccttgcggtatctggctgcctgagaaagcgcgagcgccacatccgcgccaccgagaaggcgattttcacgagccttgcgaataaactcgccagcgatgaacttcgccttttctggactggtgatgcggttgatcgtctgagctgcgcctgccaacccgttgtcaacgagtttcgcgcggtgatgctccattgggttagagcctgcattgatgaatgcaagaactcggtgctgaacagcggtagagctctggacatcactcagagtgagccacgggcagtttttcgctttgctatatgctgcaacttgcgttgcggagatgactggcttcgaactggtaaggtcgaaatcttgaacttgcatgtcgtggctccctttgttgccccgcgatctgcgccagcggcgcgacttcggtggggctgttgggaatacacataagcggtaaaattaccgccgtcaacataaaagcggtttatttaccgctttcgtgtcgcatcctgcacctcaccatgctacaacgggtttgccgcaaagcgctgcgctgggttcggatagcctttccacacaggcgactccgttcccggcgcagaaatcaccgcgaggtgcgcgcaaagaaaaaccccgccggagcggggttcctgtcgcttgatcgatgtgaaaattagtgaatgtgagagatgttgtctgctggggttgtgtgggcaagcatgccggaaggctgccaagatcccgtattttgccgaattgctttctccaaagcagcctcaagcgatttgatgtgctggtctgccagctcgactcggtccagcgcaaccttcaatgcttccatgagtgaatccatccgcttcgcattttcggatgaggaatccccaggtgctgggattgacgcgccgcgctctttctgaacttcgatccaagcatcaaaggcgtccttggcgttcacgagcgcttcttctggagtgtctccgtcggacatgcatcccggaaggtccggataaagtgcaatgtatccgccgccatcttcatcgggcagcggtgcgatcacgatggggtattcagacattactgctatccttagattgcatttcggcgtgggcgtcagagtagctcacaaggttcttaatatatagtgccctaatcgggcgcttgtagggcacgcagagtgagtcgcgcaagtatttgctcgacacaacgtagtgactgctaccgtttggcttccggacgtctagtccaatttttttgcatagcgtttcgacttgggtaattgtccagtcatcgcgagggttcgcgcgcattcgctccaagagtgattttttaggggccatctcacctcaaaatttgataagtttacttcttcctcgcaaactccgcaggccagtgcaggcgcacgcgggcggcccacttgaggcgcacgttccacatgtttgcgccggtggggttgagcgagatcaggtggaacaggcccggctcatcacccgctttgacttgcttcacccagcccatgccgtccgcgtcttcgcaaacgcacttgtagccgaccacgtcgtcgggaacgctgtcatgaccgttgcgcgagtagaacagtagatccccagcggaatatactggctccatactgtcaccttcaacctcaaccgctacaacgccgtgcggtccaataccaggtgggcactcgacctgtgggccatcgcctttctcgtaggcgtcgaaaacagggacttgagagccagcacctactttgcccgcgatcgagatggtgggggttttactctcgcctataccgtgaagcagccagagttctgagacacctaatgtcgaggcaactttgctgattgaactgacgttcgctccggcgttgtcgtctccagcttcaaagcgccttctccaatttcgaatgccgtcctttgacattccagattggagcgccaaggcctgctcggacaacttcagctcttcacggcgctcggtgatccgagccaaaatctcacccatatccatgggggtaatattaccgcaggtgtggatctgcgaagagcggtaagatgaccgttgacgaagcggtaaaaaaaccgcatgatccggctcatgatgacaatccatgctctcttggccgtcgctgacgcctataaaatcgctgcttcggtcgagcatgaccggacggtttctcatcgtgtttttgaggatagcaagaagctatccgctctccggggtggggcggggatagacgtccgccgtttcaacaatgccatggtttggtttcttgagaactggcctgagggtcacacgcctccgaagggcttgcgtgagcacgtctcggctatctctcgcgacaccgccgcctaaccctctctctatgcctaataccgcttccatacattcaagttgggtgcggcgaactcgaaccccaaggaaaaggcctttccatgcagcctaagatcgccgcgcagatgtttgacaacctcgtgacccaagcgggtggcaaggaggccgcagcttctgtcatcgcttcggcagtcggtcactcgatcagcattgggactctcacgaagatcaagaacgggcagctcgaggttccgcttctctgggcttgggcccttatggatgccactcgaaataactgcttcgacacctaccgcgcgtcctccgttcgtgatgggggagagacatgcctctacgcgctttcgggtgaagcctcggaagagggtggccaggcggtgtgcgccggtatccgcgccgcgcagtctggcgatgcgggcgattacgcagccgcagtcgtggaggcgcgagaggcctcggcaaaattcgatgaaatggccgttcggttcgaggcactggccgcaggcgtcacccccatcaggaaggcctgagacatggctgatccggtacgcggcagcagcgtgaaactcgaaggcgaagatctggtcatccgcatgccgaaggaccgagcgcagagcttgcgtgtcgctctcgctgagtgcccctgtaaggccaccaaatcaaacgccacgcagaacatccgatctggtctttccatggcgattggacgggcgatttctccgaagcctgtacagcgcaacccactgtacaagacggaggattgatcaatgctggatgaccctctcacggccatttacgccaaggtacaagcgcagcaggaagccgaggcgcgcaagattgcagcaatcgccgcgcacatcggccacaacggcggtccgaggatcgaagcacccttcggtattgacgccccgtggctgcgctatgcggacgacgcggaactctcgcgcctcgccacccttgagccacgcatcgagcgcaagaagctgatcctcgcggagactatcgctgagcgcacacggatcatgaaccgctgcatccgccggatgcgcagagccgcgggtaaggactgatggcagcattctcaaatttcgctgacatgccgctgttccgctatggcctgatcatggcagatccgccgtggtcttatgagaattggtcggcaaaaggagaccacaagaacgcaagcgcgaaatatgattgcatcggcctggacgacatcaagggaatgcaggtcggtcatctagcggctgaaagctgcgttttgtggctttgggccaccaacccgctgctggataaggctttcgaggtcatggaggcatgggggttccaatccaagaccgcaggccattggtcaaagaagacctccggcggtaagcaagccttcggcacgggctatatccttcgttgtgccggtgaacccttcctgatcggcaccgttgggaatccaaagaccgcgagaaacgttcgatcggtaatcgaagggcccttgcgcgagcattctcgaaagccagaggaggctttcgcagcagctgaggccctttgcggtgatgttcctaggctagagcttttcagccgccaagagcggacaggctgggacgtgttcgggaacgaggtcgacaagtttcagggggcggccgcatgaagtccaccaccattcgcctctcttggccccgccgcgccctctgggacaatgagaaggccagccacatggtgagggccgcagccaagcgcacacagcgcaaggaggcatgggcactagcattggaagccaagtggccgagagacccagctgcggttctcacgtttcgtttctgcccgcctgatcgccgccgccgcgacacccacaatctgccagccaccatgaaggctgccatcgatgggattgccgacgcgatgaaggttgatgacgtggggtttcgctgcgtgttcccgacagagtttggccccgtcgagaagggcggggcggtttatatcgagattggaggccagccatgagcatccgcatcatgtcagccgttttcgaaagcgaaacactgggagccacagagcgtctcatcatgctcgcactcgctgatcatgctgacgacgagggccgctgctatccatcaatcacccgcctgtgccagcgcacagggctcggggagcgagcggtgcagacgaacatcaggaaactccaggcgcagggctatgtggagatcataccgggggccgggcggaatgggtccaacctctatttcgtccgcccaacacctacgccaccccccgcaccagatgcacccccgcacgaaatgcaccccgcaccagatgcaccccccccccgcacgaaatgcgggtctacccccgcaccagatgcacccaaaccgtcagtaaccatcaatgaaccgtcattaccccttgtagttccccagccggaaaatccgaaaaagccagtcaaggcacggctgcccgaggactggtgccccagtgacgaagaccgagaatacgccctttcattgaatttgaccgaggccgagattgaggagatcgcagatgactttcatgcctattggacagaccggacagacgctggcggaagaaagtctcgacgcggttggcggcaaacgtggcgcaaccgctgtcgcgacgtcgcgccaaaattcatccgaaatcgccgaatggctggccaagcataccccggcggacatggacaaggcggcggtctcgcgggcgcggtcgcacggcgtcaatttggaggtcaaatttgagggccgttatccgactggccccaatggcgagtatctccccagctacgaggttgcagtcggctgccgcattcacgggaccacggctcagcgcgaggctgcgattgaagatctgaagaagtttcagacgcctgcgcctattccgcagattgagcgctggctggccgagctttcggttctcacagcggggcgcggcactgacggtatcgcggcagaacttcagctcaccgcatattcctctcgtttggcgcaataccccgctgatgtggtccgtcacgcgcttttgcagcattcgtggaagtggttcccatcgtgggccgaattggagcgactgtgtgaggctaaggccagtcctcgccgccacatgatcgccgccctgtctcaacccgcgccagacccggaaccgaagcgccgtccgccaacaaacgaggaacgcgcccgcattcaggccatggttgacgagatgttcccgcgccagtcgaggaaagatcgcgaggctgctgtagatatcgccctgcgaggcgattgcatgatgggtgacccgtcatgagcgccccggagacatggcccgagatccttcgccgccacgaactggagaagatgcgcgctatccacgctcatatcgacagcagccttcccaaggtggcggccaaacttgaaatgagccaggcagcacttggctcgtacatctattcccgtggccttcgctggaatcgcgcgtctctggacgcggcatatcccgaactaacgtctaaggaggccgattgatggctggatcgctgaacaaagttatgctgataggcaaccttggccgcgatccggaagtccggaccttccagagcggaggcgaggtctgcaacctccgcatcgcgacctccgaatcttggaaagaccgcaacacgggcgagcgccgcgaaaagaccgaatggcactccgttgcgatctttaatgaaggtctggtgcgcgtggccgagcaatacctgcgcaaagggtcaagggtttatgtcgaaggccagctacaaacccgcaagtggcaggaccagagcggtcaggaccgctattcaaccgagatcgtgttgcatggctttggctccacgctaaccatgctggacggggctggaggaactcagcagtccggctatgaaaatagcggctacggcggtggatacgactccgatggaactcagggcagcggatacggctctgacagtcagagcatcgatgacgacgaggtgcctttctgatggctatgagaggacgccccctgaaagaccgcatgcccccagagttctgggagcgcgtcgaggtcgccctcgttgttggtcaggtcacgttcactgagtggtcagcaagcatcggcaagagctgcgccgcagtatcgagccttcgcgcgcgtggcaccagaccaccggatgaatacatcgacgctctctgcgctctcactggatgcacgcgcgagttcctgttcaatccggaacccgtagacctcagcaaataaccaaaggcaggagacaggcaaaatgacgtggtatctgggcagaacgaccacccggcacatcgcacccgaacccggcgccgaaaaagagcgcggagagttcgcggtggagcgccagctgcgcgcgttgggcatcgaggcccacgccccccgcaggatcgagtttaagcgggtcggcaagaagcgccacgccgaaccgatcacaagcgcgtatctgccgggatacatcttcgcagagatccctgcgtccatgtttacccgcgcgatccaatgccgagggttgagcgcttccctcatggctgtgccggcccaagaagtcttgcaccatgtaaaacccttcatcgccaaggtgaaatcagagaacgctgatgcagaacggatcatcgaaagccgcgatcgcgctgcaatgtgccagtttcagccgggggaggcgctcgacgttctggctggccccttcgctgagcgactggtgaagttcacccggatggttgaggctgcacacgactcatacccgatgatcgaggcgcagatcgagatcctcggtcgcctgacgcgcgtgaagattgatccgctggatgtgcgagctgcctcttgatgcaatcccaagatgtggtattctcttcgcaaggtcgcaccaggatcgctccggtcggcccgtccacgcgcccccggtttcggaactgaggaaagggcgcgtgctgctgcaattcctatgcttgaaccggctttcgcgccgcagcatccttagaccacaccctcacaccctcacaccattcctccccagtatcacccgccactggtcaaagccctgcatgcgctagagcgtcaacagcaaggtgtagaggggtcatggcattatcctgctgaatgcagggcggcgggaacttgaactggagcacggacatggaacgcaagtaccttgatgccctagcgcgttttgcagtcaaggagccggacggctggcaagatgacccgcgcccgatgcggatcgcaaagctggatgacgctgttcgcaaggccaaaaccgcacaaaagtgaacatcgcccaccggcaggataccggaaagggcgctgctcagttgcacaaatagaaccaatcgggcgggatgcccggcaatctccacaacagacggggtgcgaatgagcgagaggcacccattctctggccgcaagggcagcgcagcccgtgaccgtttcgcagctactctctatgcacagcaaggcggcaagtgccgtatgtgcaaccagccgataccggcgagcctccggggcaagacaggtaaacgtactgctgtggtggatcacctccgtccatggcgcctccgtcctgatctcgcctacgaattgacgaacctggcgctggtctgctctggttgtcactccacccactgcgcatcgatcgaggccgcacacgcaggagacgctgagctgatcgctcaggccaaggagcgtgtggggcaggagtggtgacgagccatagcgtttcgcccttgtggcgggctggttttggccgctcccgcgccgttctgagggtagggggggggaggtccaaagttcaggcctccacactggaaacctatcgccggtcctccgtgcgcaatatctgctcccgaaagtaggggtgtcccatgacccgcatccagcgcccccgatatgacgatgttttcgccggtcacgacgagggcgggccgatggctgagcaggccaaagtgctctgggaggaatacaaggccgaccttgaggctcgtgggctttggaaccgggcgcgtgcgcggacactggaccggctggtgcgcatgactgccgaatatctgcattatcagccgctggctgtggcgcaggggccggtgcgggagagtggcgacggcgggcagtacgtgaacatgctctggtcgcaagtgaagaacatggccgagcagatcggcaagctggaaaaggcgctcacgctgacgcctgagagcgtaggcgcaaaagcagaggcgccgaagaagacaccggaaaagacggcagcagatgagttcctcggagcgcattgaccagaccacgcgatacgcgcgggatgtggtttcgggaaagatcgtagcgggcgcattcgtgcgggcgcaatgccagcggcacctagatgatctgaagcatggcccggcgcgcgggttgcagtgggatattgagcaggccgagcgggccattcggttctttccggccatgttgtcgatcaccgaaggggccaaggagggcgagccattcaagctgctgccctggcacttgttcgtggtagggtcgattttcggctggcgaacagcggaaggtttcatccggttccggttcgtgtggctggaaaccggcaaggggcaagcgaaatcgccgctcatggcggctgtaggtatctatctcagcgggttctatggccggaagcgggccgaggtctactgcatcggggaaacgaaggacacggcgcgggttatgttccgcgatgcggtggcgatgcttcgggcgccgatcccaggcaaaggcggcatgacgctggaagacgcggcgtttgtgatccgcggcaccggcgaccttgcctacagcgtcgagcatcccgacagcggatcattcatgcggcccatcgcgaacaatgacagcgtttcggggccaaagccgatccttgtggctggcgatgagatccacgagatgaaaagcggcaaggcgattgagatgtggcgggccgcagtcaccaagaaacacggtgacagcatactgatgcttggaacgaacaccccaagcgcagaccagcaggtggggacggactacagcgagttttgccagaaggtggtgaccggcgacttcactgacgacagcgtgtttgcatatatcgcgcgggtggacgagggcgacgacccgctggaagacgaaagctgctgggttaaggcgttgcccgccctgggcatcacctatccggtggacaacgtgcgcaagctggtagtgacggcgaaacagcagatcagcacgcagctgaccacaaagcgcctgtatttcggaatcccggtaggctctgcagggttctggacctctgagcaggcatggaaggaagtgcagggcaaggtcgatgatgcgaagatgatcggccgccgggcgcatttggcgctcgacctctccgagaagaacgacctcaccgcgctcgcggtggcgtgggagggcgaaaggatcgatgtcaaatcatggtattggactcgtgaatttgagatcgaagagcgatcaacggcagatgcgatcccttatcgcgagttggaagcggcggacctgatagaagtcacgccggggcgcgtaatcgactacacgttcattgcggcgaagattatcgacttttgtggacgccactcagtggtgcagatggctatcgacagcgcccacatggaaaagctctgcgaggccttcgataaggcgggtttcgcgtattggatcgaagaaggcgacgacaagccgggcagcggcctgaaaattgtcaggcataagcaaggcacgaacgtcagcttcgacggaaagttcctctgtatgccgacttcgatcacacagcttgaggaccacatgctgaaaggcacggtcaagatcgatcgcaacaagctcaccagcatctgcgcgcgcaacgcgatcatccgcgaggatggtttcggcaaccggatgttcgacaaatcacgttcgcggggccggatcgatggggttgtcaccctagcgatggccgtagggtcagccaccgcggcgatgaaaacgaagtccggattggacgactattttgcttcacttgggggcggctaaatgggtctgcgagatcgcttgaaatccatgatcattcgccgctttgggctgactgatgctcaccagatgggacttcatcgtgccagtgatgcgggggagatcgtcaccgggcatagcgcgctcggaatttcgacggtttgggcctgcaccaacttgattgcgggaacaatcggctcgcttccgttgatggtgtatcgccggaacggccaaacgcgcaccgttgaccgctcgcacgtcgtttaccgactgctgcatgacagcccgaactatgatcagacagcgctggacttctgggaatttatggcggcgtctctggagctgtggggcaacgcctacgcgcatatcttgcgggaaaatggcaagatcgtcggcctagtgcctgtcgcgccagatctgatgagggttcgccgtctgccgaccggtgaaatcgaatatcgttggtcggaagatggcaaaacccatcgggagcttgacggcgctgtgctgcacgttcgcggttttggaggttcgccgcttggcggcatgtctaccctacaattcgctcgcaatgctttcggcttggcacgtgcggttgaccgagcagcgggtgagacgttcaagaacgggatgcgcccctctggcgcgttgaaatttgacaattggctgactgatgagcagcgggcccgggccaaatccactttggttgacgacatggtgggggcgcagaactccgggcgcccaattgttctggagggtggcaccaattgggtgccattcacgatcaaccccgatgatgcgcaaatgctggaaagccgacgcttctcggtggaggaaatctgccggtttttcggcgtgccgccgcatatggttgggcacacagagaaaagcacgagttggggaactggcttggagcagcaaacccttgcgtttcagaagttcacccttcgccgccgcatcaagcggattgagcaggcgctgatgaaacagctcctgacccctgctgaacgggcgcgcgggctgatgatcgaattcaacctggaagggctgcttcgcggagacagcaagtcgcgcgccgatttctaccagtctggcctgcagaacggctggctgaccatcaatgaggtgcgcgcgctggagaacaagcccccggtggcgggcggcgaggtgccgcgaatgcagatgcagaacgtgccgatcaccgaggtaggcaagcaattggaggctggaaatgacgatgatgcataaggcggcggctccgatcctttcgatcaaggcactggacgaggaaaccggcgaattcgagggctacggcagcactttcggcggcgagcctgacagctatggcgatgtggtggtggcgggggctttcgctgacagcctggcagagcacaaggccaaaggcaccatgcccaagctgttatggcagcatgacccctcgcagcccatcggtaagttgctggaggccgaggaagatgaaaccggcctgctgatccgcgggcgcttgaatatgggcgtccagcgtggccgcgaggcggctgctctgctcaaggcgggcgatatcgacggcctgtccatcggctaccggatcaccccgggcggcttccgggtcgatgatgacaatggcgtctggtatctcgaaaagctggatctgttcgaggtctcgattgtctctatcggagccaacgagagcgcgacgatcaccagcgtgaaggcggccaaggccgctcacgaaatcacggaaaagctcaaagccggggatcggctcactgagcgagagtttgaaacgctgctcaaggggagcttggggctttcgaactcacaggcggagcgtgccgcacgcatccacctgaaagggccgggggaaccggcagcggcaactgaagcccgtgcattgcttgaagcactgcgggcataaacccacctgacataggagcctatcatggctgaagaaaacaccaggtcggtggcggaactcgctgccgaaatcaaagccgaccacgccaagagcgttgatgccgtcaaggccattgccgaggaagccctgggcaaagctcagagcggcgaaaagttggcgaacgacctgaaggaaaaggccgacgaggccctgaccgaaatgaacggcttcaaagcgtctctggacgcgctggagcaaaagctggcgcgcggcgcgggcggcgaaggtagcgacggcgaaaagtcgctgggacagcgcttcgttgagagcgagggcttcaagtcgttcaaggacggcggctttgaccgtcacagcaaggcgaagctggaaaccaaggcgaccctgaccctggcgaccactgacacagatggcgccgttggcgatggtgtagccccgacccgcctgccgggcatccagggcttgccgcagcgccgcctgaccatccgcgatctgctggcgcagggccgcatggatggcaacaccatcgagtacgtgcaggagaccggtttcaacaacaacgcggctccggtggccgaaggcgctgcaaagccgtcctcagatatcaagctggacgtgaaaaccaccactgccaaggtgatcgcgcactggatgaaggcatcgcgccaggcgctggatgatgtttccgccctgcgctcgatgatcgaccagcgcctgctgttcggcctggcgctggcggaagaaaaccagcttttgaacggtgacggcaccggccagaacctgtccggcctgatcaccaacgccacagcctattcggcggcgtttgcgccggcatccgagaccgcaatcgacaagatgcgcctcgccatgctgcaagcggctctggctgaatacccggcaacgggacacgtgatgcacccgaccgactgggcacggatcgagctgaccaaggacggcaacgccaactacatcatcggcaagccgcaaggcaccatcgcgccgaccctctggggcctgccggttgtggctacacaggcgatcaccgtggacaagttcctgaccggtgcgttcaacatgggtgctcagatcttcgaccgctgggatgcgacggtcgaaaccggctacgagaatgacgacttcaccaagaacctcgtcaccatcctggccgaggagcgtctggcgctggcgatattccgccccgaagcgtttatctacggcgatctgggctacgtggcctaagcgtcggctgatcaaggagggcggggaagctcgccctctctatgagccgaaaggagaccgtcatggaaaagtatgaagtcatgcgccgccaccaaggcgataagttctatgaggagggtgacactcgcgaggcgaagccttctgacgtggctcacctcgttgtcaacggcgtcctgcgtaagaaggcgccggaagtcctgaacaaggcccgcgctgtgccgaagaacaaggcgcgcggcaagtgaagttccgccccattctcaccgcgcccccggccgaaagccccgtcacgctggacgaggtgaaggcacaggcaaccgtcgatttcgccgacgatgatgcccttctgaccggcctgcgggacgcggctgttgcgtatcttgacggcttccgcggcgttctggggcgggccatggtcacgcagacgtggcaggtgcagcgtgcgtcctgggcgcgcgaaatgtgcctgccggtgccggatgtttccgccgtggcgatcagttacgcggatgcggaaggggccgagcagacggttgcggcggagcatgtcgaccggcttccggtcgcgaccggcacgctggttcacctgtccgatgatttcggcctaccgacgctggagagcggcaacccggcgccgatcaccgtgcaattcacctgcgggtttggtgcggcggccgatgtgccggcgaacctgaaactggcagtcaaggcgctggcagccacatggtacgagacccgcaccacggagccgagcgaggcgctgccgatgggtgtcgaggcgctaatccggccctatcgctgggtggcgatctgatgaggctgatcgagcgcgtggcctttgacgagcttgtcggcggcggtgacagcttcggtgggaaagacaaagagccgattgagcgcttcagcacccgcgccgaattcacctacctgcgcggtggggagaaggttcaggctgggcggctgtctggcacgcaggccatcgtcgccaccgtgcgtaagtcggtatccacggcggttatcggcaccgatggcaccactcggtggcagttgcgggatatcggtaagggcactgtttacaacatccgcgcggtggagccgaaccgggaaaagccgcgccagtatctagatttcatctgcgagagtggcacatgaaggcgtcattcaaggtcgaggggcttcgagagatcgacaatgcactggcggcgctgcccaaggccacctccaaggcggttgtgcgccgcgcgctgtcgaaggagctgcagccggtcgcagatatggcgaacgggctatggcctggcgccgacgacagtgcattcgctgtttcctccaagctcaagagaaacctgcaaaaagccaaaagcagcaccactgcggtgactatgtatgttggcgcaactccttccgcacctcactcgcatctactggaatttggcacagagcctcgctttcacgaaagcggaaagtacgttggtgcggtctcgcctcgaccgatgttgacaccttcctgggatgcattccgtgggcagatcctagagggactggccgcgtccttgcgagaagagatcgaggcgaccctggcgcgccgcgcaaagcgaggcttctaatggaagagcacctgtattcaactctctccgacgccctgagttgcccggtgaagtggggcttcttcagcgatggggagaccatgccacgcgtgaccatgacccgtatgtcggggaagcgctaccacaccctgaacagcaaggggctgatgcaaggctccactcagatcgactgctggggcgcgacctataatcaagctatcggcgcgtctcgtgaagtccgggctttactggaaggataccgcggcggcccgatcgtcagtgcgcttctcactgcgatccgagacagcaacagcggcgatgcctcggctgcacaccgggtctctctgacattcgcgatcacttatcgcgactgactggctgaaacagcctcaatcaccctcgaaaggatcattcaatgaccgcaaagaaaaccgcttcggcggcctcaaaacctgcatccaaagacgctgcaccgatggttgtcacaggtgtcgaactgaagcgcatgcccatggagcaaaataagcccacgcatcccttcgctcttttcaaaggcccgctgcccaaaccgggtgatgttctcgagttcactctgaagaacggcgtgacctaccgggggaaagtctccgaagcggtcgagtccgacggcgaggtgatggctgagttctccgccccattggctgtcgttccgaaagaataggcctcggcctataaatccgcgcccctaggcgctttctctctatcctgaaaggaaactgatatggcgcaccagaccgcctctggggtgacactcggcatttcggccgctgcacccgcaactcacgacatcaccggctttgacgctctcaccttcacttccgttggtgaaatcacgaacgtgggtgagttcggcaaggagtggcaacttgtgactcacaacccgctggccacccgcggcacgaagaaaggcaagggtagcttcaataacggcaccctgagccccagcctcgcgcttgaccccgacgacgcgggccaagctgcaatggaaaccgctctcgaaagcgatgatcctgtctacatcgccgtgacactccaagatggcacgatctactaccttgtgggtctggtcatgtcgttcaagccgagcatcggcggtgtcgatgacgttgtgacggcgactacctcgattgagatcatgcccgacgagatcctgaagaaggccgcagcctaacctgccgcgcgctgatccgttctcaggaacggtagggccgggcggaaggtggttcgttcccccggcctgtttgaaccactgaaccaaaggatgatgatatggatttcaacaagttcgacagcgtttctgccgcagaaaaaggcgcagctatgcaactgaaagacccggccaccttggcgccactgttcactgaggatggcaagccttgtgaggtaatccttctgggttctgaagctccgtctgttcgtgcagcgatgcgcgagcttcagaaggcgcgcgccaattcgcaggacgccgaaggtgatacggatgacgaaggtgtatcgtatgaccagatccacgataagttggtcgaaggattgcttccccgtgtggtcggtttcaacaatgttttcaacggtgacaaacccgctacgaagcgtgacgcgaaatggttctttggcctgaatcgctttaatggtcaggaaggcgaaaagtcatttgctgaacaggctgctgagttctccgctaagcgcggcggctacttgggaaacgcctccgccggctgacgctctatgcagcccaggccggtttccttgcagcaaggcctgaagaatggaaaaccagccgcttcaagctctggcagagagagggcatcgacttcgcattgcctgatatatccggggtcgaataccttctggacatgatggcgcaggagggccttggctggtgctccttcgatcagatgggtggtgctgagccggtcgcttggtccgagatccgggccttctcgaaagagtcgggccttaatcttgagccgtgggaggccaagcaggtccgcgcgatgagcgtgtcatatgtcgccggtatggcgcgaggccagaggcctatgcaggtttctccagcctatgacgacaggccggataacgatcctggcgttgcgatggagcgcaagaagctttcggacaaagtgggcgcggctctgtctgcaatggcggggtcgtgactcgacatgtgagtgtcacgtccctaaagttctgctttccaggagccgattttacgaggccgggccatgcaaaaagctaaggaaaagccagaaacaaaggcctgcattttgggtagatttaagatgttgaaaaacaggattttgaaccgccgcgaagagctccttgaggaaagcaaggaggttgatcgaaaacatgacgaagcaaaaagagacatcaagcgaggcgcgcggaagtcagatcaccgattccgtctttgactttttgtatcacgatggacgtcgcatcgcatcgctattggcccaattcgatccagccgggcacttacagtcagtctccaccggaaaatcagctgaagagggaagagacagcgacgccgctctagctgtgaccggcggccttcctggggtcctgtctgccaagaacgacaccaaggagatcacccgccggtctcacgcagaagagattcagcgcgtttatgacccaatgtggtcaaatgctcgggccctcctcgacacgctagatgaaaaaggcctaattcaacgaggattgtctgacgcctgcttggggcaactcgttctggtgaaaggcaagttatcgatcttcgatcttcagatggtggcggggctttggtcgatgaagtccgtgcagggaaagatccaagagagccttcctacaattccaaaattgcctaaaggtgtaaaagaaacaccggagatgagagcaagtgtccgaatcgccaaagaggcccttgcagaagcacaattcagccttgatctcttcaaggacatggcacccacgctgccacatactgcccaagctgaagttttagacgcaaacggtaacagggtttggtgcactatggacacctcagggctcgctacgccaccgtcggaaatcgcgcttaaacatggtacagatgttcctggcgattgggcaatgttgggaattctcgacgcggagccaactttaggctctcaaagcgctcgagatgtttcgcccgacggcgaagaaatggtcatgaagctttttgaaaatctggcgccggcattcagaactcttctcggcagaccaaaagcggcgcatggcatgacaccattgatggttttccgagaggttgtcgccgcacgtaaagaagatttgtagtaaacgctttttgcaggctgctcgccccgcaaggggcgggctagaacttcaatccttcgcagtaggcccgaagctcttcgggaatgcccttccattcttttatatgagttcggcgcatctctttcaggtgcgttgcaatcttttcaagttctggagaggggttctgctctttcgtcagtagccttgagtgagcctcgtaaaccttatccagagctgcgggcaggtcgtaaatctcatccaagagattgatacaatccctatgcggaacatcgaagcctcgcgcccctgcggcaggcgcctgaaatgcgattagtcccgcagctacaaccaaaaacctcatcacctcaaagtcctcctgaatccaattcatggggatcattcacgtttcccctcactggagcaagcatatgtctgcaatcccagttggcgccctgcgcgccgaagcatcgttggaaaccgcctcttttgaggccggtagtgctcgggcgcgcaaggcacttggttatctgcgtactggtttcgaagagaccagccgagatgcattgcgtcacgccgaagggatggcgcggtcttgggatgatggtttcaagaaagcagcttctgcggcacagaagcaaatcgatgcgctgacaggtgtggagcgggcgtccaactcggcttcggcttctgcaaagctgtgggcagggcaattagatcggcaagccaaatcctttgatcggctgcgctcaacgctcgatcctgtctacgcctcatccaagcgatatgaggctgcggtagagcaggctgaaaacgctgtgcgttccggccttgtcacgcagcaagaagcaaaccgcgtgctgcagctggcagagcagcgatatttgggcacgtcgtcagcggccgataaggcttccacgccaacgagaggctttcttgggctgttttccaaggaacgaagccatgatctgaggcagattggccttcagctgagccaggtgggccaacaaggatctgttactggtgactatctcggagccgcagcaattcaggctgccgatattggcgccatgttcggtattgccggtattgcagccggtaccctgatcagcgtgctggggccaatggctgttgggctactcgaggtaggtgatgcttcaagggaaatggaggaacagtctcgcctgaattctgaagcgatgggcgagcttgttggggcgctcgacgattacacgctgtatgctgacgccgcgcgtcgtggaactctggagctaatagaagagtttggcatctttgctgaggacgtcaaagagacctacgagtatctctctggggtctcgataaagcgcgcactggatggtttgcaaactgagaactttgatctttttgcgaacctgagtgatgctgcatctgccatttctgccatggaagatgcacttgccgcgttggagcgaaacaagtcgatcggagccacctctgaacagatccaaacattcaaggagaacttcgaggcacttgaagaggatgcttatgtagccgctcaagccgtcgggctcatgcccgaagaaattcgcgctatcaaggcaggctttgacgagcttcgtggagcacaagcgcttgaggacatccaaagagagtccaaagaagccctagatatcattcgagagttctaccctgagggacaaaagctgccttcagctttgacagatgcagtagttcagctggaggccatcattacggcatctagcagggctgtgtccgacaccgaggaggccacctctcagacgatacgctgggccgacgccatgatgggtgtcaactctgagatccaagcgatcatgtcgtcactgtctgcaatcggcggcggcatgctctctaacgcggcgaaattcgtggaaatcgaagcgctgcaagccggtaagtcgatcaaggcagcgcgccaagaggccgagctattcaatcgagagaccgattggaacgcccgctcgcaaggtgcgaatgtttttgagctgatggcgattgaggcagagagatgggttttccgctcgggacaggctgcggatatcatgctggataaagagcgcgaagccgctcgcgagagagagcgtgcactgaacaaggtgtcctctgccagcggcaagtccaccaaggcgcttgaaaacgagcttaaggctctcaaagcatctctcgacccaatggaggcttatcggcaagagctggaaaaactggctaagttccaaggtattttgtccgaggatgaaatggcgcgtgcgatgcgcgatctgaatgtcgaactggccgactcattgccgcttgtcggtgatctgacagacggcctcgtggatggccttttcaacggcttcaccgacggtctcgacggcatcttggataccttcgagaactggctcaagcagatgatctcggtggcactgaaaaacgagatcgtcgttccgttcatggccgcgttcagcggtggcggagccgtggccggtggggtcgcccaggccgcagccgggggcggtagtggcctgcttggcaacgtccttggactgggcagtggtggtgcgttcagcggtgctgtgagtggaatttcctcgggccttggcggcgtgctgtcaggtggtggccttgggtccagttttgcgaacctgggtggtctggtgaccggttcggtgggcggctggggcgcagtaggcgcggcgctacccgctctgggcgctgttgctgcagcggtgagcttcttcaccaccaaaaccaagcacttggataacggccttcgcgtgaccgccgataatatgggcaccttggttgaagagttcgacaaggtgcagaagtcccgcttctgggggctctccaaaaaggtcagcctcacctttgaggaggcagatgaggctacggctgcgcccatccgcaagtccattgaagacatcaccacctcaattggcgctgccggtgcgcagcttggtctcactgctgataatttctcaagctggtccacgcagatccaggtcagcctcaaggggctggatgaggcggcgcgcaatgctgagatccagcgcatcttcgataccgtcgccgatcagttctcctacgcggcattggggtcgttcaatgaggccatgggtggcaggctgatccgcgaaggcgaagacgccgcggccacgctggatgcgcttgtgtcctcgatcacctcggccaatcaggccatggaactgctcaatggggcgatgtttgagacctcggtctacggcgcagatatggcgcggcaactgatcgatgcagccggtggccttgataccttcaatgcatctgtgaacagctacttcaccaacttctatagccaagaagagcagctgacatcgcgcacaggcttgttggcagatcaattcgaggccttgaatgtcgccatgccggccaccaaagaggccttccgcgatctggtcgaggcgcaggatctcagcacagaagagggcagggtgctttatgcaggtttgcttaacctgtccggtgagttcgccaatctgagccagctttcggaagagctgtatggctctgcttcgcttgctgccagcggcatctctgcgctggtgcgctccttctccagtgacgtcttgggggcggaggatgaactcgctgatgcgcaggccacagcactggtcgagtacaacaacgttatgcggatcatggatctgcagatccgatcggcacaaagcgcgcgtgactcgatcaaaggcatcttcgatatcctctcggatgggctgggcgcccgcacaccgcttgagcttgaggcgcagcgcctgcagcgcgaacggctgaagacggagctttctgccgggatcgatgacccacagcggctgagagaggtcgtgcagggcttgaacgcgcccgcagagcagttcttcagcacatacgcggacttcgcctatgattacgccagaacaagcgccctcatggatgagcagaagggcatcgcagaggaacagctcacagaggcagagcagcaactccgggtactggagaaccagaagcgcgcgatcgaggaactctatgggccactgctcgggatagaccagaacaccgacaacctggaagaggccatggagcgcttggagaccgccatgcttggcgtcgaggctgccatgctgcgtgtcgaggactcgatgtatgcgcttgctcaggccctgctctccgcagtctcgggcatcgggggtacgggcgggctgatgggcctgggccgggacgccttcgaccagttcagctttgaccgcaccaatggcattctgagcgagaaaggcgcgggagtgcttgacggcgttgccgcgcagatcaacggcctttaccaagatgtctttggccgaaatgtcgatgtgtctggcttggacttttacggcgaccttctgcaatccggacaggtcaaggcgggccgcatccagtacgatctgatgacctcgggcgaggcccagacgggggtgacaccgggctttggcaacatcggctctgcagcgcagcctgttgatccggttgaggcactgtatggctcgatgctgggccgcgcggcagatccagcgggtgtcgaattctggaagtctacaggcctgcagggcgaggcgcttatcaacgccttccgagatggggcgctggccgctggagacactcccagcttcgatggtggtggttacaccggcagcggaccgcgtgttggcggtatcgatggaaagggcggcttcctcgcaatgctgcatcctcgtgagacagttatcgatcacacgcgcaccaaccgttcgggtggccaagccgagggggatagcagcgcagtggttcaggaattgcggaaaatcggtgaacggctggcggtgctggaatcccatgcgcgcgcaacgacttacaacacgggcaaggcgatgcggacgcagaccaaatgggacagagacggtgttccgaaggagcgaaccgaatgagttttagaatgatcgagccagagacgattgacgacgccgcatttgtgtcctcgaccgttcccgaaactgacgcgcccgtctgggatgcatcaactgactatccgttctctgatccggacaacccagaagaggtgattgtcgaagtagggcagcatgccatttaccgcgctgtcgctccctcggggcccagccatggtggcgcagtcgatcctgccaccgacacggggaacaccaaatgggtgaaaatccgctctaccaaccgttggcgggtcttcgatgagtatatcggcgatccgagcgtgcaggcaaatagcgcgcaatgggtgataaccgcgcccaaagtcatcgacagtgtgtctttgttcgggctctacgccctgtcggtgacggtccttgttcgcgacagtggtggggccgaggtctacaatcagacatactcgctgcaggatgagagtggtgtggttgatctctacacctacctcaccagcccgattatcctcagtgaccgcttggtcatcacagatattccgccctacgcgggtgcaaaggtgactgtcactgcggaggcatctggagaggacgtagaggtcgggcagatcgtgatcggccgaaaagaagagatcggcgtcacgattgatgagatcccgctatcgatccaggacttctcccgcaaagagcgcgaccctgattttggtcgggtgtcgctgttggagaaagactttgcagacgaaatgcccgtcgcatttgtctttccgacctcgcgcgcttcctacctgaaaagccgtctggcaagccgccgcgccaaactgacggtctacagcagcgatgggccgtacaaggccaatgagttttccgtctacggattttaccagtcctttcaggtcgttccccgcatcgggagcgagtctgagggcattctcgaactggagagtatcacatgagcgatccgacgatcacaccgccgccagatgcaccatctcgtcagcagccgtctaccttctccgcgcggggagatgcgttctttgcctggttggtcacatttgctgctgaggtaacaactgtcatttcgtgggtctcggaaaaggtcaccgaaatcgcgggcagcgcaaccgcagcgtctgatagtgcggctgcggcgtctacaagcgcctcgcaagccgcgcagtctgctctgaccgcatcgggtgcagcgaattaccaaggcgactatgacgccggttcgctatacgcggttggcgaaagtgtgtcctacacgggtagcgaatttgtcaaaaagaccactgcgcctgctgggactacgccggttgatggtaccgattggcttgaggtcgggaacgccgcagttacaagcaaagccttgactttaaccgggacgtctcccgctttggatttgtcagctgctgatttcttcgacttgaccctcactggcgacacgacgttgtcttttgttaatccgcctgtgacgggtaccgtcaaaaactttaccctgaagctgacaggtggttccgagaacgtcggtttcgctctgacatcagcgacgtacgacggtgtttctttttcggtaggggcacagggaactgaaccaaaatcaataaccttcaggccagacggcacaaagatgttcgtcagtgacggcagcaccccggactccatataccaatatagtctgtcaacagcttgggatttatccaccgccagttacgacagtgcctcattcaatgtgacttcgcaggtgggagtagttgaaggcgtagagtttagttcagacgggacgaaaatgttcgtcctcgatttcaacagtgacagggtctaccaatacactctgtcaacagcgtgggacttatccacgggaagttacgatagtgtttcgtaccttgtgccgtcaccggtgacacaacctcaaggcttggcgtttaaccccgatggtacaaagatgtacgtgcaggggtacggtccgaatgaggggatttctcagttcacgctctctactgcgtgggacttgtctacggctagctacgacagcgtcaattttgacttcactgcgccgtctgtaagtttcgctgtgaacatgtccatctcaagcgacggaacgaagatatttttacagaactccagttctgtaattcagtacaacttgtcgacagcatgggacttgtctacggcgacctactctggggtttcgttttccgtgtccgctcaagacactgcgatgaaacacgcagttttcaaaccagatggtacaaaaatgttcgttgcgggggacgccaacaactcgatgtttcagtactccgctgatgtcgacgttgatttcactttgacctacccgacgatacagtggccgggcggcgtcacccctacagttgcgtcaggtggcgactcggatctgatagacttcaccacttatgatggaggtgtcgtcttttacggcacgaagcgaggagacacttactcatgacttacgctttggttcgagacggcgtcttgattcaatacccttattccctcgaagaccttcgtcgcgacaaccctcgcttgagcctgccgctcacccttcccagcttcaagctggcagagtatggcatgctcccggtcttgatcgcagagcgacccacccaagcgatggacgaaacggcagttctgtcagagactcctgagcttgtagaagggcaatgggttcttggctggacggtgcgggcaaagacacccgaagaggtcgcagccgaacgccaaaaaatgcgagcaagggtaaacgcagaacgtgctcgacgtctggtcgctggcacgaaagtgaccgtgaccggtaacggccctgtggccctttcggggcgcgacgaagatacacggaaccttcagggtctcgctttcgcggcacagcttcggttggcagatggcaataccacgcaccagaccactttcagggacgccgagaacgtcgatcacgttctgacgcccgcgcaggtactggaaatgtggtccttgggctctgcatggatcgaacaggtctatgccgcgagttgggcgctgaaggacacgcaaggcggcatcccggcagactacgccaatgacgggtattggccgcagtaactggtacatccgccacggggacggatacttcaccacaactgaactcgcatgggagattggagccaagggctccggtctctttatttacgtgcctccgggctttgcctttgacgtctcgattcctcgctgggccgggtggatcttcgaccggcacgatccccgctatctgaaagctgctgcgctgcatgattacgccctccaccggctcggttgggggcgggtcagcgcggctgcacccttttccgaagcgctgcgcgccgctggcgtctcgcgcatccgcaggctggcaatggttctggccgtcactatccacaaatggagatgagcaaccgtgaaagacctgctgtttgcgattgaattctggttggctatggcggcggcaattctgctgaagctgcgcgcctcgccccaaataacccttttcggggctatcaccaccaccgcgtcagcgatctgctgcgctctggtgttcactgagccgcttatggattggctggagcttgatggcgaggtctacacctacgcagtttgcgccctgatcgcgctgaccggtgagcatatcgcccgacagatcctttccctcggcattgaggatgccgtccgacttctgcgggggaacaagaaatgacgtggggcaagtttatcgtcggggcttggggcgccgtgcttgcgctgagccttatgaccagtgcgctacccgcgagctggtggtttcaggctggggaagtgcgcgttgccgacgcttcatccggtgagtgtccggaaatgcagtttgatcgcgagatcaaccggccattcaaggccgcctggaccgttaccatcatggggcgcgcctcctatggctgggccacctatcgcacctttcagggcgccaatgactatcggccggaaaaccagcttccggacaagctcgatctttgctggtggacgtgggcggatccgcttcacctgccaccgggggaataccgtgtgaacactctctggcgcatccatccgacacagggcagggcgcgcgagatcaggcgcaccagcaacacattcacgatcagcggaggctagaatgcagaagaacttcgaccgaagccttgattgggttctggcccatgaaggcggttatgtgaaccatcccaaggatccggggggagccacgaatatgggcgtcactcagcgcacatatgatgccgatctgcgtcgtcgtcagctctcatctcgcagcgtcaaactgatcaccatggaagaggtgaaggcgatctatcgcagccaatactgggacaaggtgggtggcgatgagcttcccgggggcttggactactgcgtctttgacttcgcggtaaatagcggtgtttcgcgcgcagtgaagttcatgcagcgccagctgggcgtcaaggctgatgggattgtcggcgtgaacaccatggaagccgtagaccgcgcggacgtcgaagggttgatccagtctatctgtcaggctcggttctcctggctgaagaagctgcgccactggggcacgtttggccgcggctggacacgccgggtgatgggggaaagcctcggcgttcaggcgcgcgacaccggcgtgatcgatcgcgctgtctacctccatcgcgaacttgccgtcattcacgcgccgtcctatcgcgaggatggttcgggagcccgcgccgaagacggtgaacggagcctgtctgccacggtcaaggagctaatcacgtctggcaaggggtggaccaatggcggcgctttgggtggcggcgcaatcgccctcacacagcttcaaggccctgttgcctatgccgtggccgctgcgctgctgattgccgctgtgaccgtcgctctgtacttcctgcggtcgcaggaggctgcggcatgacgggcttgatcgcattcctcatgcgcatggggttcggcggtatggtggacaaagccatcagccatttggagcgccgcgcggagctgcaaaatgaccgcgagaagctcagaagccaaacgactgtagagctggcccgtgaggccgtgaaagaagcccaggtcatggccgactacaatcgcgccaagcttgcctttccgtggttctggctgttcgctgcgctcttcctcgtacccttggccgcatggtggaacgcagtcattctcgacagcatcttcggcttcacctggtctgtcgcagatctgccaaccccgcaaatgcaggagtgggccggggatatgatccgttggctattctatgtcggcacaggtgtcggagcgcttaagtcgcttcggtgaatctggcacaacctcaaagacgagagccccggtgaatgccggggctttttcgtttcttgatccgctcttgatcgtgcgctgatgcacagaggggggatttcaggagtgttcaaatttcgcggtcagcgcgcggatttggttggcgtccatacagttccacggattgccgaatttcacgcggtcatgcgacgcctccacaaggcaagcgtagaggtgcttcccggcctctgtggccgctccccatttgcaatccatgaccttgtttccatcacggtccaggatgcgctccgggatgtagtccccagcgacatactggcagacgagttgccacggcatcgggtaatcgtcgctcaatttttcaaagcgttctgctggtgtcatgtggcctccgggggtttttaggatttcttggggtctacccaatcggtgcccttgtacccgtaggagcaaggcgcaccgcaacggtagcagtgggactgtggcatgccgggatagccgccgccgcgcggcacatagaactggtgcccgacgatgcagcaccggatctcgcgccacagctgccgccaggacggtttaaccgctttattttggacgtgatcaggtttcattgggttggtcctgctagtgcaacggatttcatgattgggttaagcggggatatggccggactggagcgcttcgatatgctggtgaaaagagctgatgtcgttgatcgccattctgccctctctcacgcagtcggctccccacatgaagtgccgcatgccttcgtcagtgatcggcaggtggtaagacctatcgaccgcccaggctgcgcctttcatgaaccaaactttctcgcgcctatgtttcttcctgcgcttcatggtcgcctgggattcgacggcatcgtgggcggcactgctcatcacgctgcggccttcatctgaaagtcattcttgagcgccacctcagcgcgctccaaaaggtcctgcagttggctgatgcggatccgcacctgcctcgcattggaccttgacttgctgatttccttgtaaagggcttcagcatcgtgacggttgtatcgccagtgcaggaaaagaggatacttggtgatgcctctttcccgcgcaagctctgcgtatcggtcgcaaacgctttgcagcttcttccacactcccgcctctgcaaagtagtggaagcggcccagatccttgcaattgcgcaagccttccgggctttgcatttggcagatctggtcgatggtcgggcgaggcttccgtttgcgaaccttctttgcgtacccgcagttcctgcaaattttccggtagcctggctcggccatgacttcgcccgtgtcgaagtcttcgaactctccgtacttcaggtcaaagagggctccgccattcgggcagcagtttttgcaaatctctgatcttggcatttaaggctccttttcaggcggcgcggaactggtaacaagactatgtttctggactgtatcgcgctgcagttgacctgtctagatagttagtccagattaggcgtgaaaattttacgcgaggtagtaagaaagtggcgtccgaatccgagaaccagccgacacgcaagatcggatacgctcgcgtctccactgccgaccaaaacccggatatgcagatccatgagctgaagcggtacggcgtcccagaggaattgatctttgtggaccgggccagcggcggcaccatgaagcgaccccagttcatgagggcgctgaggtatgcccaatatgaagggacggagctggtcgtctggaagctggaccgccttgggcggacccttggcggcgtgctggatacgctcaagctgctgtcagaccgcggcgttaccttcgtcagcctgacggagcggatcgacaccacgggccctatgggcaaggctatgatccaccttctggccgtcttcgccgaactggagcgagacctgatcgtggagcgcaccaaggccgggatcgagcgggcgaaagagcgcggcgacgtgggtggccgaccaaaggctatgacgccggagcgggttgccaaggcagaggaaatgcttgccgctggtgagcgcggcaacacggtctggaaggcgatgaaggaactcgatgggccgacgatcagccgggcggcatactacgcctggcagaaggaatgggacgcgggccaccgcgccccggatatcgttggagagtgatccagaaaaggagcgagtctatgtgcgtgacggcttggctaggggataaatgcctggagacggtcggagacgtccgagccgcgcttggatctgtcgtaatcaacgacgaggatctgctccgtcatagtgtggctgaaaaaggttttgacctcgaagaattatgtctctgtgtaatcgaacatgaggctactgcggcagctgtcggtatgaggtgggtccagccagcctttgatggcggcgacccaatgtgcggccggttcgagccgagttcttgaaggagcgagtagtggggaaaattcacgtcgatcaccgcgtggtaatcagagacgctaaggatcgaattgtctcagatgagcacttcgagagctttgcggtcgccgaagtggtttaccggcgaacggttgcaagtacctcgcgagatttggaggtaacgctccagcacggcgcgcgcgtcgtctttcgtgcgagtggtcagaattgacctacaaagcccgactcacacattcttgctttgttttcgaaatgtccgtgtgagtgaatttgggtaaggctttgattttagatggttcaaatagaacttaaaatccccaggcgtaagccgtgcgggttcgaatcccgccgcccgtaccaccatgaagagaatagactttttccaaattgaagatcagtgtgagattagcttggtacacttccggtacacgagttggtacacgttgcgttctcagccgcgatttgctcgaatcttgacaacgttgtttgccgatcctgagcgatcgcgggtgtagatcgcggtagtggcgccctgggtgtgctgagcagcgtgctggagggttgtagggtcgaccagagacatggcttcggtgatgccgccggctcgcgtgtcccggatctgtagctcatcagggaagggctcgaggtcggagcgcttgcgagcttgattgacctgccggagaacctctttgaagcttcgcgaaatgacaccgtttttgggcggcttcccggagctcagtttgattaccgggccggtgcgctgatccttggggattgccaaaaggcgttctcggatttctggggtgtgcttcaggctgaaggtgtatggctctgtcaggcttttgcgggttttgctgatcactttggtgaaggaggtcaggtcccggtcgaacatatcccatgtcaggccgtcgacccagatttgtccaccgtcgcgaacgcctccttgctggtcttttgccttcacccattggccgtgaacgtcgacgccgcgcaggatgaactcgaaccgcatcaagatcgctagcgataggtacgggcgccccatacgatctgcttgcgcaacaattgcctcgatctgttctcgggtcgcgtaagttgaccgacggggagggttctggatccggacctcctcacggatggctttgatcttggagcagtgatcgtccccgatcttgatcccgtgagagacaaccagcctccagtgggtgaaccactttttgatgtagtgagtggaacggcccttgtcttgcatcgcttttttccaccgcatcatgcgctcgaagtcggtttcttcgatcaggacattcccgatggcttgctcgatgtatcccatcatctgacgatacttgtcctgggtttgcggcagaacgtcatgatacgagctgaactcgtccgaaagatagcgagcaatcaaccatccccatgttcctggcttgcggccctgcttctccccatcgaaccattgaagcatttctcgagttagggcacggcactgagcggcgcgctctagatcaagcccgtcgccttgcgatcccccaagatcataggttttgatgctgtaccccgcatcgagatatttactggtgggccgccagaaatagcggtccctgtcttttcggtacttcaggaacggcgcgtaagccggttcactgtcgtcccagagcgagtctctaaaacgcatcggtgttctccgtatggttgctttccgtcaaccgcccggagcgcgctgccgcagttcttgtgttgcgttctcgcgcccattcctcaactgcctcacgatgacgcatgccaatggcaggatcaatcttgggaaagccgtactgacgctcgagtgtatcgctgtttgagcgcagccatttgacgtcatggcctagcatcttggcgatgtccgcctctttaacgaatagctgctgtacaggcatctcaaccctcctgtttcaacacgtcttccagcctgttgagagtgatcgacagagcatgctcgatcgattgtgccgggaggctcgctcgcttcctgcgctcgatctcagccagaaacagagcgccggcacgctcaaggttgcgcaggcgatcccggggtttccaccaatcgcgttcccatggccaacccttcggggccccatcggcacgcaacacggtgtcgtgaacggtgccgtggctaagatacaaaaaggctgcagtcgcaagttctccaccggtgtgggcgtcgtcatgagcctggttccagccttcgacagagatctgccgctggcgttcagctattatgcgatcgagagcgttcattgtgcggcctcggtttccatctccgggggcagccaggtcgcaatccgatgctcggcctcgggccccagctgaagagctttgcgaaagtcagcgtcattgaacaagcgatgcaggttctcaatcttatcggacttcctcatggcattgaagtctgcggcgtcggcttcgggtcgaccctctagcaccagatcctgccagaggctttcgagcgctgccttgctgatccggctgaagtaggtgggggcgtccggtgtccagaccgaacggatgtcaggttcgaccattggggccaagagggacgttccaagcgcgttaacggtttggccgttgattgtccggatcaggtgacgggtcagcaccgtgttgcggtgctttttgcccttggcttggaaggtcttgaagctttcggcatagttgccctgcgttctcccgagctcccgctgattgctgccatcggaaagcgcgtcgtctacggtccatgcgccttccgcctcaggttcgatctgcggatcggtcagggagatattgaacaggccactgtaggtcgcgtagccgcattcgagctgccacgcgaagagatccagaaccagctctgtcttgcccaaggtggctgtctgcaaggccaatagctggatcctgcgaagatcttcgacgccggcctgcgtcagctttgggcttggaatgtcggtttccgcgccggcatcaccaggtctggtgtttttcttggtgctcttttgatccttgtacgcgccgtcaatgcacagttttccgcggtgatcgacatagacgtatattccgcatttcgcgcgagtcgcttcttcccagaagggcttcgcctttgactctaactcattcaggcgcttcgcctctgcaggtgtcagcgtctcgcggaattccttgtcctgcagctcggcctgttcgttctgctctttcattgacagtggcgtctttttcccagccacctgcgtcaggtttgacgtgagtgaatatgggatgtgagactccgagtgtggtttgacccagttccagccgaattgcaccttgataccctcggcgatgtcggcaagtttcttttcgaagagggcgtccaggatatccggatcctcgagataggattcatcatcgaataggtcatcgcgcatgcgcccgccggcggcgacatagccgtcccgaccgacatacgcagccttgtaattgctcgcgcgaactttgctgtcggtcagttgctgcttgacccaccactcctgtcttttgccgtcgagcgcgccttgcaggacttccagctcctgctctggatcacgggcgagggtgagggccttggcaacatcaagcgtgatgtcgccccggcgcagtgcctcgatcgtcgctgtgcaaaggtgggccaaggcgaggcgccccttcacgtgccgcacggtctgggcaaatgtgcgcgcgatcatctcggccgagtttccctgatccgccaatgcagcataagcccggatctcatccgccgggtgtaagggtttttgcgttgcggattccgtgccggcccatgcccgggcgaggaacgcatcatcggtgacctgaacgggaatggccgacaggtcaggtgctttgctgtccagcatctgcgcgccgttcttgcctaggtggatcaacccgcgcaggcgacggccacccgcaacaatgccgacgccggagtttgcggggtcgcgatagcccagaaggttctgcaagagaccgttcacggtgattgaatccgccatcgctgcgacgtcgtcgtcaggcgtgtcctggcgcgggttcatgtcgtgcaagtaaagctcggacaacgggaggtattgcagcggggcgtcgggatggttcagagggctgtgcttggtcatgaagaggctccagatgtttcgggctcggccgcgaaatccatcacatccgcgaaccactgaaaggatttggcgcgcagatcatcgagggatcgtgcctgaagggtggtttccatttcccagtcgccggcgaagaggagggcctcgctctggccgtcttcctcgaagtggaaaaggaggtcgatgccgtcgaggcgccatagctcttccgggcaaccacattcatcgctgggcacacgggcaagcatcgaaataggggcagtcccttgcggcttcagcgtagaaccgacgcgcaaatcggccagcgtctccgcgccgtcgtcgcttacgtattgtttcccaatgaactcgaccaaagtagcctcctgaagtgcgactgaattggtcgggggtatttaaagagcgcccgctcactctctcagatttacagcccacggttcgcacgtggtggcctgttccttgacacaggctgcggacctttgacgtttgtgtggtcgtccccccgcagctggtccctctccacctctgagccgggaatccggcagtcctattcggccgcgcgctgggggccttggatcaggtccgcgcgcccggcccgttccaggagcggcggcagcggatccgtcgcatccgcgaccattggcatcagtacggcaaaggtattgggctcgcccacgaaagagatcagtctcgcgtgtccagctggggcggggttgacctgaaacccacgagaccatccaatcaaatccgtgaggtatccggtatcgagcgcggtctggcgttccactgggcgtgcaagttcggacgtattggcggacgtatccagagccttgcgccaatcgggaaaggaaatcgggttgtatcggatctggcagaatacatcaggccccgcctcggctaggcagtgagcgatgtcgaagtcgctgctcatcgccgtcatcgtgtcttttgaaaactcaagacgcgtatcgcaccagtgaatatcgttgagatcgccgattaagctcatgtcgtaatcgaagcgggtctcagtcagccacgcggcactcaccttcacaacgcatttttcaggaaccttcgtgtcaggatcatactggacaagcatgcctttaccatcggtagcgacaagccaggcgccgccattcgggtctggatcgatcagcacgccatcaatattgaagcgggtgttttcacggcaaatcggcatcgcgcgaaaaagtgcctttgcaggaagatcgaagtcaaaattcatctggatgctccttttgagcccgggtacaggcggcgggcagctgcaagttcttgaaaacttggcacttggtgaaaccgctgggcttcttcggcgttggcgggccgggtgcaacctctggcatcgacaatagcccatccggtttcggtggccgcttcataggcggcgattactctttcctctgccatgagagtctcctgacttctgggcgcggctcggtttcgcgtgagtgatggaatttgcgtgccgcgcccggacataactggaatggttggccgggagcctgctcgaacgctcccggccgggctgcctcagcagggacctgcgggcacaggcccctgctgcagtcgggggtgtatggtaagaaacccatcatcctcgaccagatcggcattcttgagcacctcctccgcccaggcgcagattgcggcatcctcgctgtgtgcgagagcggaatagcctgcgagctgcacctcaaatggcgtgcacgctgccagatcgatcgggtaggtgccgcctgcctcgatcacggcggtggcaaagctgtcacgccgttcattggctggcagcgccaatagcgtgcgggcgaaagtggcgatagggcacggcgtcatgcgcggcgatctcccggcacagggcggggtcgtgcgagtttgtaccccttgcggtgcgcgatctctctgacggtctcaatgatgctgcgagaggggcgaacatcgtgcagagagccgggaaggtttgaggtgcgcatgtcctgaccgcgttgcgctttcagttctgcccaagcggtttgaaacacttcgggagtttcactgtggtcctcgggggtgctgaggatgcgaaatgcactctttgtgaggtcattcatgttgctgctctccgtctgtatggacgcgaggctagtgaccaatatggtcatcgtcaataacaaaaatgaccaaaaaggtcataatgagagtccagtatggtctcacagtatcctgcgagtgtcagactcaatgcgatgctgtataagggcaagtattgacggagaggcggaaaatttaatgactgagcatgtgtttagcttggtttcggcgattaatgccaggatggatcggttgcgctccagggggtgtgaattagctgttactcacgattttgaggatgccgctcggcgacttgaggctgtagggaagccatacctaactccatcgctatcgtttgcatggaacgatttcacccgtgattcatgcttttgggtgtcattggctctcgagggcgacgtcatgggggctgcaggtgtaaagagggaggtactgaatggggagccgatatcaagttactggaggcgcagtctaaagaggcagtatccgcgcgatgatggcgctgatgtgatttcttcggtgtcgcctcttgttgacctcagtcttggtggagagttggcatattttggggacctctattttcatcccaaacttcgggaattgagggtgttagaggattttgggcgagtggtgctttatcacgctgcactcagttttcgtgttcagaccttctatgcgtttttaaaggatcgggatttgcgtcgtggctttgggtttcaattgggcttgatgtcctgcattccgcaggctcaggtttggtctcagcccttcccagaaggcaggggtagtcacgaggcttgctgcttctcgcggcgtgatcaagtgctggagttggcgcgactagacgctggtattgcatagacgccgacggctggtttgccattgaaatctttgaccgggaatagcaggcgcttatacatgagttcgtttacttcgggctggccgtgcacgtgtgttgcaagggtttcaatcgaaataaggcaggtacctttcccagcgagttggtaagaagtgacaagcttcttgcgatcggcggcgggaaaattatccaccgccctttgaagcatgtcgttcgattggatcggcaatacgcgtgctgcgaggcttttttcaccgaggtgtaggagtgagagggtagtgtcgtcaggctcgggaactgcgtagatgactataaaatcaagaattgttgtaggtagtgggctgtttgttcggagggctacaagatccgttacctcatcgatggagggggcgttgccttcggcgatatcgaggagctgagcgtcgggtttgattgacagtgcctcacatattctgaaaaatcggccgatccctatgtcgctttgccgtttgaagaggctggacagaaagcttctgctgttcccggttctcttcgaagcgtcattgagactcacttgatgggtatagcagtgctcggtaacccggcgctctagccaagtcacatacctctgatgacttttctctggcatgttgaatattttcaatgagctaagattgattttgacataggcagagcgcgtagtgcttctatcgtgctatggttgtattttgagggaaatctgagtgatttactggatttcaaaccccaagcttttcttcgcgtctcgcttggcggtggttacgggtaggacagttgatgagttttattttcaggagtcttggttttcgatgtttcgcattttagtggcgaggtccaagggaaggccgccccattgacccaaaatcacgaagtccatcgtaactccgaagcgctcaaccagtagcgcagcaagttcttttgatgcagcgcgctttccgccttctgtgcgcgaccaataggtgcgctcaatccctagtaggtctgcaatctcagctggctgaaggccgagtgcgcgcctgagtagtcccagacgatagccgatccgctcggggcgcatctcgttggaaaagcttgtctttccggttgtctgactgcggttggcgctcatgacacttgttatcgtgaccaagctgttcattttcaatcaccaaaaaggacagttgacgaatgaccgaaatggtcattatgtttcgtgccatacacgataggggctacatcaagtcatggatggaagagtttcgagcgtcgccgaattgattgatcgatggccgtctcgcggagagttggccaaggatgctgatgtgcagccgatcgtcgtgcagcgttgggcggcaagagggagtattcccgcgaagtaccaccttcggattatgaacagcgccagacggcgaggattgaaggtcgatttcgaggacatcgcaagagtacacgcaggctcctgatcgttgagtatcacagctttccatgccgtcagtttcggcgcggaaccccaaaaccccaaggaataagagtttccgatggataagaagctttctgcacatatggccaaggcgctgatcaagcgggcaggcggcatcccggcggcctgtgccgcgatcgaagcggagactggagaggggatcgcggccggaaccctgtcaaaggtgcaaaacgggcacctcgatatcagctttctctgtgtgctggcactgaccaaggccacgggggatcgatccttcgtgaacctcttgaaccgggaatgcgaggacgcgaccggcgccgaggagatccttgcgcatcacctcgagatgctgcgcgaaagcaccgagatggttgaagcggtcgctcgtgccgaacagaagcccagccgcgaaaccatccagcgcgcccggaaagaagctgcggatgtacacgagcagagtggccgggccatcgccgcctatgatgcgatgctcaacgaattgaatgctggcgtggcgtcaatccgtcgatcgattgcgggggatgtgcagtgacctatcgctcggaagttaatgcagcaggtgtcggcgagctccttgccgaggacaccaccgatggaggggcaggtgacctgcatgcagcccccacaactcctccctgcggaacctgggcgcgtgatggcgaatgcaattacgcgcccctttttcagggggcagtcgcatgagcgcacatagctcacgcagccgttcgcggcatccggatcccaagacctttgatcgggaaaagttccgcgtcgggcatatcctgtttgagctctgtgatcatcctgagaacggaaagacttttgccctcatcgcgggtgaggcgaccgaagccaagtttatgcgcccgatgttcaccggattcgtgcagcgcgggatggggacgcaactgcgccgtttggcgcatcgcttcgatgagcttgaagcagatctttcgacagatggagatgacgcatgacacttcgaccaatcgatgtatcagaacagccaccggtccaggtgaaagcgcccgtatccgagccggaattgcgctggttagagatctccgatcttgtcgtgaatgacctctaccagcgtccgcttggggcaaagaactggagtgttatccgaaaaatagcgatcaagttcgattggtccaagtttactccgatcactgttgcccccagcggcgagggctgtgataggtttgcgatcatcgatggtcagcaccgcgtgcatgctgccgccatgagggggctggtacgcgttccggcaatggtcgcgaatattgcgccgcctgagcaggcatcctgtttcgcggcgatcaattcggctcggaccaatgtctcggcgttccatctgttcaaagctgggcttgcggcgggtgatacatcggcgcggatcgctgatgccgctgtgagcgccagcggctgccggctcatgccgtacaataagtctgctcgcaaccgcgaggcccgtgagatctatgccatcgggctggtgcggggatacacgtcacaaaagaatggtgcatcgatcgtgacgcgggcattgcgggcattatccggatccgcatgcgccgaggatccgcagctgtatcaagcccgtattctgcggccctggtttgccaccctctgggatgaacctgagatgtgtgagctgaacctcgaggccttcgtgtcgaaagcaaatctggtcagtgtacgggaccggatcggcgtgatgcgcgagagacctgagtttgcgaaatggtctgactacgcgctcgcggcaaaatcgttcaaggctctcctgcgccaatcggcgcgcagcggcgagattggctcatatcttccttctgagggagatgagggatgatcgcgggtggtttcggtggaaacgcaaatcgccccatgctgagggcggtccgttgaatgtgcaggacgccaaatgctgtgagggcaaaccggaggagtcccagagtgagcgtcgaggatctctgctcgtggagctgtgcgtgctgctaaaggcggtgcagcctgaggatgtccgtaaggttgcgaccctcttggtgtcctggctggatggtgccggcgcaggcatgccggagcttgatgtgttcggtgatctgcgcggcgacgcaaggttttgggccgatatcgcacaccctgctgaactggaggcgtatgtcgctgcgggcatccgccgtctggaacgcacgcagctgtccgaggcggctcggaagcgtctgttcgtcgccttctgggaagtcatggcggatgcggatcggcgcaagtttttggaaagggccgatccggccggaactttctataaggtgaaaccgtgaaagatgggtttgatctagtggacacaggagatccattcgacacgatcacgccggtcatcccgatttcggatcggccgcgatcgcagtcggtggtcgcaggaacgctgaacgacccgtatcgccgccaggcggtggccgatgcgcgcagcctgtggcgtaagtcaatccccggatcgcgcggcgtcgttgctgcctatcttgcctcgcagggcatccagttggatgaaattcctgcaaatctccggttcgtgcttgaccatccgtacatgaagaaatccggaggcctataccatgagctacatcgcgggccttgtgtcctcggcgggatcttctctgaggcaggccagctgcttggcgtcaaccaaatttgggttgatccaaagccgccgcatgggcgcgcaagcattcaaatggacggggaccatatgcctgcagagatcgtgcgcggatcctgtaaagggggattcctgccgctggtttggccagaggcagccacggctctggtagtagcacgtagcctggaagcggccctgcgcgcctatgcgtcacgcccatccgggctagaggatgcggcctattgggctgttgtggatctcaaggtgatgtccggcaagatgcagcggcagaagggtgttcgatactcgggcctgcctgatctgtcagatgatacctcattcgtcgcgccgcattgggtgaagcgcctcgtgttccttcaggaagatgacaggactggcactcggcagaagctcgaaagtggtctgaagcgctcgatgcacgttcgccccggcttacgggcgtcgatcgtgcggatcggctccgctgcgaagggtggagtgtaacccatgcagatcgaattcctgtgtcccgatgatgccagacaggccgaacatatcagcgagactgcagaggaattctacgcctcacggcgtccagatcttgatgccagcgagctggcggcaatgtcgcgttggctcgcgtggaaggccggcgtgtccggtcagcgcgcagtcacggccggcagcgatggcgacgatgggctcgcgcgtgagctggaggaatggtgcctgtcgctgtttcgggcagcgacgctcgcgcacgagtttagtcaatcaaaagagtcctaacgggccaattgcaggaaaggagggcaggcatgacgcaggatagcgatgcgctgcaagcggatttcgaaaatgaagaagtgatcgctccgatggatgatggtccgccacctcagaaaccgagaggaccaattggaaaatcgggcgctggagcgggtagggcggggcgtggtggtaagcagggcagcggcaagccgtcatcgatcttgccagaaggattccccgtgcagccgctcggtatgtctgcgggaaagtactatttcctcaatgcccgcggtgagagaatcgatttgaccgcaggcgctttgagtcagcgtgccaatctggtgtcattgctggctggcagcacaacgccgaaacggcacctgaaagatatcgctccgccggacgcgcgcaaggatacagatttcaaccctgcaaatgcggctgacaagctcatgcaggcctgtgccgaaatgccgctttatgatccatcgaaaccggtccgccatttcgggacttggcgtggcggatctgtgcatccggttgtccacctcggcgaaacggtcgagacctcatcggaagaagaggttgtcgggcgcatgatcggtagtgacctctatcccgcagtgccgacgctgggcctcccggatggggtcgcggccactgcagaagagatgaacatcatccggatggcgcttcgcgatgggtggaactgggtgtctccagatgccgtggatctggtgataggttggattggtcaggcggcactaggccagtacccccgatggcgcagccatatgtggatccgtgggcgttctggtgccggtaaaacaacgttgctcgaggtgatatcttcgctgctaggtgggatgtcgacaggtgtgaagagcagcgggtcatcggcctcgatcaggcagacaaccaaccggatggcgattgcgcggatctttgatgaggccgagggcaccgggaccggcgacatcgaagatgtaatcgctctgtttcgtctgatgtccgatgcgcatggcgcgcgggtggagcgagggacctctgaccatactggcattcgctttgagatctacggagcgggccttctgggctcgatcattccaggatcgatgacgccacaggacagatcccggtttgtcgttgttcctctgaaggttagagagaagtcttcagatccggcgcatgacgcggtcgagctcgacaagttggaacgaagggcaaaggagcttggcccccgggtttggaggcgcatgctaagcctagcgtcccagcgttgggatagcacgtttcgggtttacaacagccttgtgcagagcctcggcgcccaggcacgtgcaggagacacggtaggcgcattgcttgccggctgggacctgatgctgttcgagaggccgctggtggaccctgagacaaatcaggccgatcctaagcgcatggagcgcgctctggccatggcactcccgcttgtcgaggaaacccgcgaggctgaggaggagggcgaaggtgagcgcctgctgacgtggatcttcggagcgatgatccacaaggatcacggtggcatgatttcggttagcgagttgatccagaccatccaggagttccaggacgtgaagtcgggcgaataccagaacaagctcctcgctcgattggggctgagggtcatgccgggcgagcgcgggcagcgcgacctcttcgtggcaaacggtgagaacccgcagctgaacaaggcgctcgcgaacacgcggtggcgtggcggtgggcaccgcgcagcgctggatactatgcctgaggtggctcctgcgccaaagccagtcagagttgatggtaggcccaagaggggcctcgttgtgcccgcgcgtttcctccccggctatatcaaagaaaccgcctcgaacgagggggaggatggcatctgataggttggatgggcgttacgtttgagctcgagcgtaacgcaaacgtaacgccttaagtaacggaggcaatgcattgaaaataattcagaatatatgaaaaaattcagtgcggttacggcgttacgctgcagggagagcctccctgacgggcaggcgcgcgaacggtgtgcacatattcatcgtaacgccggaactcaaatctatctgataacaaaaagacattaataaacagagacttgggtgagttacgcaggccgttacggtggcgttacacttaagtcaaagcgtaacgggcgaaaaagggcagtgaaaatgatgatgagggtgaacatgacaggtcgttcggcagtggcaggcagcgtcctgtgtatgcctggtgcggtacggtggcatgcactgtttgtgctaccgcagaaggaagatcaggctgaggcatggcttcgtcgacgtggtgtctatggctttcacccggtcactacgcgccgtactacgagagctggaaaggcgcgtgaataccatcgtcgttacctgccgggctatgtgttcgctcgctttcccggcgaagctaagccgcatgaggttctgtcttgcccgttcatacagggcgcgctcacgcgtgcagatggcgcgtggggcgtaatcctcccgaacgacctgcgttcgcttcatgctatgcgtcgggttgatgaagacgccgatcgggcgcgtcgtgcagaggagcgtatgcgtcgacgtcgccagtcgatccaacgtggtgacgctgcgctgttcaaatcgggcgctttcgtcgggcaccattgcgaagtagtccaggttctcgcggacaatggcgccaaggtaagtttcaagctctttgggcgcgaggtgctaacgacgacatcggtagatgaccttgttgcgattcagcgaaacacttgactgggactaagagccgcgactaacgtccccaaccatagccccattccggcaggtccccgcgcgatacgcggcagcgccccggaaggtgggcggcggactctggttaaaaacgctcagagtgacccgcctgtaatgtgcccggagcgatcatcgctgccgggctttctctatcatagttcgaggcgctgatgcctaagctgaagagactggagccaagacttcagggattgaaaccgcgcattgcggccctgaagaccgactttgacacgacgcgccgacagcaacatgcatggcggaaatggtacagcacggcacgctggagcaggctgcggatgcagtgcttcgagcgtgatctcttcacctgccagatgtgtggggcgattgaggctgacacatcgaagctcatcggtgatcacgttcgtcgccacaatggggatccagatctgttctgggatctcaataacctgcagtgcctgtgcaaaccctgccacgacagggagaaacagcgcactgaggccgccgagcggatcgccgggggcataggggggggctgatccctccagggggcggaatacccaaaccggcgcctatctcatgtggagaatttttttggccgagaatgaaaatcccgacgcctttgacctctttgggaaccctgtcttttccaccaaaggaaagcggggacgtcccaagttccaaaggactgaggaaaatgcacgtaaagtcagtatgttacttggcttgggctggtcgaatggtcgaattgcctcctgcatcgtggatccgcgcacgggcaatgcgatctcggagccgacgctaaagcggtattttagatccgagctcggtgagcggaacaaaatgcgagatcggctcgaggcgcggcggttcgagcggacctgggcggcggccgaggcaggcaacatcggggccgagcggcttttgatgcagatgctggaaaagaacgacctgatgggggccagccgacgcctcgatgatgctcagtcgagcaaggatgctgcgaagcccgatcgagaaacaaagctcggtaagaaagaggccgcgcgacaggcggcgcatgaaagcgctgaggatagcgaatggggcgcggatctcgatctgcccggatttcgcccgaactgaggtttgatccatgctcgatgcgttcattgatcctgctgagcgggcggcttggtccacggcggttccggactgggaagagcggatcctcaatcggcaatcgctgatcccggatcttccgttgtgggacgagccagctgagcgggcgctgcggatcttcaaacggcttcgggttcccgatcttatcgggcaacctacctacggcgaggtcagcgatcagtgggtctttgatctggtgcgtgccatcttcggcagctacgacccagtcaagaaacggcggatgctgcgggaatttttcctgctgatcccaaagaagaacgggaagtcggcgatcgcggcggcgatcatcctgaccgcctgcatcatgaatgaacggcctgaagcggagctgctgctgatcgcccctacgatgacgatcgccaagatctccttcaaacagatcaaggggatcatccgggccgatccggagctggacaagcggttccatattcaagatcacgcccggatgatcacgcatctggtcagcaaggcggagatctcggtaaaggccgctgatggggacgtcatcaccggtggcaaggccacctatacgatgattgacgaaacccacgagtttgcccgcaagagcaaggcggacggagtttttctcgaactgcggggggcattggcatcccggcctgaagggtttgtgatgcagatcactacccaatcaaaggaacagcccgccggcgtgttcaaggctgagctcgagaccgcgcgtgccgtgcgggacgggcggttgcagtcgccgatgttggccgtgctctatgagttgcccaaaaagctggccaaaagctggcagaagcaagagacttgggcgctggtcaatccgcacctcggccgatctgtcgatccggccttcctgcaggaccagctggtcaaggcgcgtgaaaaagggccgaaagagctgcagctgttggcctctcagcacttcaacgtcgaaatcggcgtcggcctcggtggcggatggaccggcgcgcactattggaagaaagcagggccgcagacgttcggccttgatgagttgattgcccggtctgacgtagcggttgttgggctagacggcggcggtctggatgacctgtttgggctggccgtggtcgggcgcgagatcgagaccaaaaattggttgatgtggttccacgcctgggcgcatccagaagtgctgcgggtgcgtaaggagattgcgtcgcgtctgggtgatttcgccaaggctggcgatcttattctactgggtgaggacgagccaacgggagatatcgagggcgcagcgcggattgttggcaaacttctcgaggcgcagttgctgccggaggaggccgcaatcgggctggatacggtgcaggtctacgcgatcctcgaagaattgatgtcgatcggtgtcgcggaagatcagctacgcaacatcggtcaagactggcgcttgtcaccggcgatctggggcatggagcggaagctgaaagacggcacgctgttgcacagcgggcaaccgatgatggagtgggtgcttggcaacgccaaggttgaacagcgcggttctgccgtgcggatgaccaaagaggccgcggggcgggccaagatcgaccccctgattgccggcatgaacgcctttaccttgatgagccgcaatccggttgcggcggggtccaagaccttcgtttacaacgggatgtgagaatgggaatttttgatttccttcggccagcggcgacgctggctgaaccagccgtgcgcgctgaaccaccggtgtctgcagcttcagacacctcggtttcgagcgaacgtcaatggaagggttttgtcgttgcgggcggtcgatcaaaggccggcgtgccggtgagcgaaaccaccgccttgaccattccagccaccttgcaggcgcttcggatcttgaccggcgtctttgcgatgacgccgctgcatttttaccagaagaccgacagggggcggatgtcggccgaaggcaacccggcggcgcagttgtttcggctgggtccaaacagtcaccagactgcctatgcgttctttgagctcttgttggcggacatcctgttgaccgggaatttctacggctatgtcagccgggattttcggggcgaggtgaaggcggtgacccggctgaagcccggccagtgtcagccggtcgaatatttcgatcgcgccgaaggatcgatcctttttttcgatgccaccttgccggatggaagccatgagcgtttcccggcgcgtgatatctttcacgttggcgggttctctcgggatggggttcagggtctcaaccccgtgcaatacgcacgtgatgccttgggcggtgcaattgcaacagcggatcacgcggctcggttctggaacaagggcgggcgcccttcgacggtgctgaccagcgagaaagccattgggcctaccgataaggatcggatcaagaccgactggacccaaatgtattcgggtccagacgccgatatggttgctgtcctcgatcaagatctaaaggccgagttcttggctcatgatttgaaatccagccaatatctggaaacgcgacagtttcaggtggtcgatctcgcccgaatctggggtgtgccgccgcacctgatctttgatttgtcgcgcgccaccttcggtaacatcgagcaacaaagcctcgagttcgtcatctatcacttgggcccccattacacgcgggttgcccaggccgcgactaaggcctttgccaagatcgggttctactttgagcatgtcactgccgagctagtcaaaggcgacctgaagagcaggatggaggcttattggctgcaacgccagatgggcatggtgaacggcaacgaactgcgcagctacgagaaccttcccaacatcgaaggcaatgcggggacggactactggatgccggcgaacatgcaagtagccggagcatctgcggcgccgggcagcaccgaagacaccagcggagaccaatcatgaaacaggaattgacggcgctggttgcggccattcgggcgcagccctgggcgatcatgccggattatctcgatgcgatcgaagccatcgcgctgcgcgcccttgatgaagacgtgctgaagcggatcgcgcaggacggccacattccgcgcctcgaaggcaatttgtcggccgttgcggcggtaggaacgcgcctcgagggagctgggatgagcactgtccgcgacggatccgccgtggtgccgatgttcgggccgatttttccacgggcatcgatgattaacgcttcttccgacggaacttccttgaacgcatttatgcgggacatccgcgtggcgcaggcgtcgaccgatgtgcatcggatcgtcgtggtggtggatagcccgggcggcgtggtctccgggctcggcgaagcgtctgaaacgctgcgtgccaccacaaagccgatcaccgcctttgtcaccggcaactgcgcctcggcggcttattggctctgcagccaatttggcgagatcgtgatggatcgctctgcggcggtcggctcgatcggggtggtcgcgtcgctgtcccggcaggaggcggcggataaccaggggcgccggtcttatgagatcgtcagcagcaatgccccgaacaaacgtccggatccgtccacggaagagggccggacggccatccagaaagacatcgacgccatagaggaggtgttcatcgcagatgtggccgccggtcgccgcgtctcggccgatcgcgtgcgaagcgattttggccgcggcgcaatgctctcggccacgcgcgccatcgaggcgggcatggctgatcgcattggcacacttgagggggtgctgactgaaggttccgggcgcacccggaaaactggagcgggtcgcagtgcgcacgcggccgctgaaatcgaaacgcggcggcgcgccgcaatgaggaactgaccatggataagatcctggaactgcgagcccgccgcgcgggtatcatcgaccgtatggacgcgctggttgcgtcaatcggcgatggggaggaatggacagaggatcagactgcccaattcgatgccctgaaggccgaagatgataaggtgacggcagagctcacccgccttgaagatgtggagcgccgccgcgctgaggccgcgcgtccggccgcgccgctgcctggtgctgcgggcaccgaagctggtggggtaccgactgcacccgcagccccgaaggagccaggcctgcagttcgctcgcatggtgcgcacgatcgcggcggcgggcggcaaccagtatgttgcacagcagatcgccgaggcgagcggagacagcggtctttttgccagccagaacatgtccaccggcaccgccggcggatttctggtgccggaagatgtgtccagtgaggtgatcgagctgttgcgcccgctcagcgtcgttacagcgatgggcccgcgtattgttcccatgccgaacgggaatatgactaccaaccgccgcgcgagcggagcaaatttcgaatatggcggtgagcagcaggacatcaaggcaaccggatacgagtatggtcaggtgaagctgtcggcgaagaagctgagcgggatcatcccgatatccaatgacctgctgcgcacggcctccacggccgtcgaccgaatggtgcgcgatgatgcactggccgatgctgcgcagatccaggatcgtcatttcctccgcggtgcgggaacagattatgcgccaaaggggcttcgtttccagcacacgggcacgcctttcgccgcgacccatgtgctgacgatgaccgctgcgccggatctgcaaaaggtggataacgatctcggccgcctcgagctcgctctggcgaacaacaatgtcgttgtgaccggggcgcattggatcatgtcgccgcaaattgcgatgttcctgaccaacctgcgcgacggcaatggcaacaaggtttatccggagatggccaatggccagctgcgcatgaaaccggtgcacatcaccaccgagatcccgagtaaccttggtggaggcggcaacgagtccgagatcatgctggcgcatccgggtcacatccttgttggtgagcacatgggcattgaagtcgcgatgtctaccgaagcggcctacaaggactccgcgggcaatatgcaggccgcgttctctcgcgacgagacactgatgcggatgatcatgcagcatgacattggcctgcgccatctgccagccgtggccgtccttacgggcgtcacttgggcacccggcctctgatcctgagccggtgggcccagtcgggcccgccattacccttcggtcatactgaggagacatgtcatgaccacacaatttcgaaatatcggcgcgctgatttcggttatgcgcgccaccgccaacgtcgcagcgacggcaggcggggcaggcgacaacgtcgaagtggtgggcgccatcattgatcgcggcgagatcggtttcccgcaaagctgcgtactcgccatcccgttctctgcgaccctcgcggagggagagacgctgtcgattgcctgcgaaatcgagtccagcaacgacccgaatctcagcggtgccacagccgtgaccactgctgcgagcgccgtggttgcaacgggcccctccggtggtggagccgtcacgggcaccctcgagctcgatgcagctatcatgggggcggggcgctacgttcgcgcgaacttcacccccgatctcagtgcggccaatactgacacggccgcgttgtcatccgtcctcgtattcggcggtgcggaccgcttgccagcatgaagtctgtcgagtttctgaaatcctatcgcatgtatcaaccaggcgaaatcgccggattcgatgatgcgttggcggacaagttgatcgcgggtggtgttgctgttcttcctggcgctaaacgtgccttgaagaccgaaaccgccgatgagctggggcgcccggtggatcgcgacgatgccgttgtcgatgttgcatctggcacagaggctgggaatgggtcgggcatcgatctcagtacggtggtgattgaaacgggaagcggcgatcagtcgtcacccgcagcctttgagaccgtcaccggagatcctggcgcagcggatgctgccgatgcgtctggttcggatgacgccacatcaaccgacaccgttggggcctcagggggttctgccaaacccagcaaatctgcgtcagggtcctcatcggataccaccaagaaatccactgcaaaaaaggcctgacgaatgcgtctgacccttaccacgccagcggctgatcttcctgtgtcgctcgaggaggcaaaaaggcactgccgtgtcgaggcggatgacaccgaagatgatcagctgctcgagggtctcattgcggcggcagtggactacctagatggcccgtccggtatccttgggcgggccattatcacacagacttggcttttggagctgccaagctttcccgtcaaacttgatcttccgctagagccggttcgttcggtaaccatcacctatctggacgcgtccggggcggagcagaccttgccggaaggagcctatgagctgaatgcgcgaccctcgcagcggacgcagttggcattggttagcggcacgcagatgccagtgctaaaagatacaagctggcctgtcaggatttcgatcatcgccgggttcggtggtgccaacgcctgtccgccggggttgaaagtcgccatcaagatgatcgtcggtctttggtatgagcatcgtgaggccatcatgccggtagatgtgaatagtggctggccggcaccagttggtgctcttttggcgcgctggcgcattcctttgtgagagggtgagactcatgaagaatagagctggagccggcaggctaaaagagcttgttgcgtttgaccgtcgcgttcccggacatcccgatggtctgggtggtacgatcgatgtttggaccgagatccgaacctgccgcgctgagttcatgttcatgagaggatccgagagtgtcgacgcggcccgcttgcagggtcggtccgttttcagagtgcggatccggaaactgggtaccgctcggtctctggctcagaacgtccgtatgcgcacggtgaaacgaggacttccggaaggactcgacgatcaggatccgctccccggcgtgcgttacaatgtccttgaggttgacgcgatctcggacagtaaatgggttttcttgagtgtcgaaacctcggagcaccccatctagggatgtcagcacatgaagtctttgttcaaggtcgaaggcctaagagaggtcgataacgcgctcgctgcgctgcctaaggctacatcgaaagccgttgtacgccgcgcgctgtcaaaggagctgcagccggttgcagatatggcgaacgggctatggcctggcgccgacgacagtgcattcgctgtttcctccaagctcaagagaaacctgcaaaaagccaagagcagcaccactgcggtgactatgtatgttggcgcaactccttccgcacctcacgcgcatctactggaattgggcactgagcctcgctttcacgaaagcggaaagtacgttggtgcggtctcacctcaaccgatgttgacaccttcctgggatgcgttccgtgggcagatcctagagggactggccgcgtcgttgcgagaagagatcgaggcgaccctggcgcgccgcgcaaagcgaggcctctaatggaagagcacctgtattcaactctctccggcgccctgagttgcccggtgaagtggggcttcttcagcgatggggagaccatgccacgcgtgactatgacccgtatgtcggggaagcgctaccacaccttgaacagcaaggggctgatgcaaggctccactcagatcgactgctggggcgcgagctataatcaagctatcggcgcgtcgcgtgaagtccgggctgtactggaagggtaccgcggcggcccgatcgtcagtgcgcttctcactgcgatccgagacagcaacagcggcgatgcctcggctgcacaccgggtctctctgacattcgcgatcacgtatcgcgactgactggctgaaacagcctcaatcaccctcgaaaggatcattcaatgaccgcaaagaaaaccgcttcggcggcctcaaaacctgcatccaaagacgctgcaccgatggttgtcacaggtgtcgaactgaagcgcatgcccatggagcaaaataagcccacgcatcccttcgctcttttcaaaggcccgctgcccaaaccgggtgatgttctcgagttcactctgaagaacggtgtgacctaccgggggaaagtctccgaagcggtcgagtccgacggcgaggtgatggctgagttctccgccccattggctgtcgttccgaaagaataggcctcggcctataaatccgcgcccctaggcgctttctctctatcctgaaaggaaactgatatggcgcaccagaccgcctctggggtgacactcggcatttcggccgctgcacccgcaactcacgacatcaccggctttgacgctctcaccttcacttccgttggtgaaatcacgaacgtgggtgagttcggcaaggagtggcaacttgtgactcacaacccgctggccacccgcgggacgaagaaaggcaagggtagcttcaataacggcaccctgagccccagcctcgcgcttgaccccgacgacgccggccaagctgcaatggaaaccgctctcgaaagcgatgatcctgtctacatcgccgtgacactccaagatggcacgatctactaccttgtgggtctggtcatgtcgttcaagccgagcatcggcggtgtcgatgacgttgtgacggcgaccacctcgattgagatcatgcctgacgagatcctgaagaaagccgcagcctaacctgccgcgcgctgatccgttctcaggaacggtagggccgggcggaaggtggttcgttcccccggcctgtttgaaccactgaaccaaaggatgatgatatggatttcaacaagttcgacagcgtttctgccgcagaaaaaggcgcagctatgcaactgaaagacccagccaccttggcgccactgttcactgaggatggcaagccttgtgaggtaatccttctgggttctgaagctccgtctgtgcgtgcagcgatgcgcgagcttcagaaggcgcgcgccaattcgcaggacgccgaaggtgatacggatgacgaaggtgtttcgtatgaccagatccacgataagttggtcgaagggttacttccccgtgtggtcggtttcaacaatgttttcaatggcgataagcccgctacgaagcgtgacgcgaaatggttttttggcctgaaccgattcaacggtcaggagggcgaaaagtcatttgccgaacaggccgctgagttctccgctaagcgcggcggctacttgggaaacgcctccgccggctgacgctttacgcagcccaggccgggttccttgcagcaaggcctgaagaatggaaaaccagccgcttcaagctctggcagagagaggggatcgacctcgcattgcccgatgtctccggggtcgaataccttctggacatcatggctccagagggtatcggctggtgcacctttgaccacatggggggcgcgcagccgattgaatggtccgagatccggtcgttctcgaaagaggcaggcatatacctggagccttgggagtctagccagctgcgggcgatgagtgttgcctacgtcaacggactggcgcggggcagggagccgatgaaggtctccccggcatatgatgacagaccggatgaagatccgggcgtggcgctggagcaaaagagactgtctgacaacctgggcgcagcgctttcagcactcgcgggttagttccagtgttgctgtcaccctagctcttgaggtcgaatgacttccgccgcgaccgtcggcacagagtactcaaccgtcggctttaactcgctaccaggcggcctatctttaggtgttttcattctcgttggccttcggagcatttagaatgcacctctgctcaggcgcgacagaatccctgatttgcttgagtagggaaatgacttctgcggctgctaaaaagaccaagcctccgccgataaggcctgcgccgaaaagagccaagcttaactctagtttggaaagagcgaacagggcgaacccgcctccaacaacgatcgtaattactccaagcgcgttgaaaaccccgttcaatttactttcctcacaataacaacctcttgaatccaattcgagaggatctttccacgttctctctcactggatcaaccctcatgtctgtaatcccagttggcgcgctacatgccgaagcatcgatggaaacagcctcgtttgaggccggtagtgcgagagcgcgcaaggcactcggttatcttcgtggtgggtttgaggagaccagccgagatgcattgcgccacgccgaggggatggcgcggtcttgggatgatggtttcaagaaagcagcttcggcagcacagaagcaaatcgatgcgctgacaggtgtggaacgggcgtccaactcggcttcggcttctgcaaagctgtgggcagggcaattggatcggcaagccaaatcctttgatcggctgcgctcaacgctcgatcctgtctacgcttcatccaaacggtatgaggctgcggtacagcaggctgaaaatgctgtgcgttccggtatcgtcacgcagcaagaagcaaaccgcgtcatgcagctggcagagcagcgatatttgggcacttcgtcagcggccgataaggcttccacgccaacgagaggctttcttgggctgttttccaaggagcgaagccatgatctgaggcagattggccttcagctgagccaggtgggccaacaaggatctgttactggcgactatctcggagcggctgcaattcaggctgccgatattggcgccatgttcgggattgccggtattgcagccggtaccctcatcagcgtgctggggccaatggctgttgggctactcgaggtaggtgatgcttcaagggaaatggaggaacagtctcgcctgaattctgaagcgatgggcgagcttgttggggcgctcgacgattacacgctgtatgctgacgccgcgcgtcgtggaactctggagctaatagaagagtttggcatctttgctgcggacgtcaaagagacctacgagtatctctctggagtctcgataaagcgcgcactggatggtttgcaaactgagaactttgatctttttgcgaacctgagtgatgctgcatctgccatttctgccatggaagatgcacttgccgcgttggagcgaaacaagtcgatcggagccacctctgaacagatccaaacattcaaggagaacttcgaggcacttgaagaggatgcttatgtcgccgctcaagccgtcgggctgatgcccgaagaaattcgcgctatcaaggcaggctttgacgagcttcgtggagcacaggcgcttgaggacatccaaagagagtctaaagaagccctagatatcattcgagagttctaccctgagggacaaaagctgccttcagctttgacagatgcagtagttcagctggaggccatcattacggcatccagcagggcggtgtccgacaccgaggaggccacctctcagacgatacgctgggccgacgccatgatgggtgtcaactctgagatccaagcgatcatgtcgtcactgtctgcaatcggcggcggcatgctctctaacgcggcgaagttcgtggaaatcgaagcgctgcaatccggtaagtcgatcaaggcagcgcgccaagaggccgagctattcaatcgagagaccgattggaacgcccgctcgcaaggtgcgaatgtttttgagctgatggcgattgaggctgagagatgggttttccgctcgggacaggctgcggatatcatgctggataaagagcgcgaagccgctcgcgagagagagcgtgcactgaacaaggtgtcctctgccagcggcaagtccaccaaggcgcttgaaaacgagcttaaggctctcaaagcatctctcgacccaatggaggcttatcggcaagagctggaaaaactggctaggttccaaggtgttttgtccgaggatgaaatggcgcgcgcgatgcgcaacctcaacgttgaactggcagactccttgccgctggttggtgatctaacggacggcctcgtggatggcctgttcaacggcttcaccgacggtctcgaagctatcctcaacgggtttgaagactggctcaagcagatgatctcagtggcactgaaaaacgagatcgtcgttccgttcatggccgcgttcagcggtggcggggccgtggccggtggggtcgctcaggccgcggccggtggcggtagtggcctgcttggcaacgtcctcggtttgggcagtggtggtgcatttagcggtgcagtgagtggaatttcctcgggccttggcggcgtgctatcaggtggtggccttgggtccagttttgcgaacctgggtggtctggtgaccggttctgtgggcggctggggcgcagtgggcgcggcgctgcccgctctgggcgctgttgccgcagcggtgagcttcttcaccaccaaaaccaagcacttggataacggccttcgcgtgaccgccgataatatgggcaccttggttgaagagttcgacaaggtgcagaagtcccgcttctgggggctctccaaaaaggtcagcctcacctttgaggaggccgatgaggctacggctgcgcccatccgcaagtccattgaagacatcaccacctcgattggggctgccggtgcgcggcttggtctcaccgctgataatttctccagctggtccacgcagatccaggtcagcctcaaggggctggatgaggcggcgcgcaatgctgagatccagcgcatcttcgataccgtcgccgatcagttctcctacgcggcattggggtcgttcaatgaggccatgggtggcaggctaatccgcgaaggcgaagacgccgctgccacgctggatgcgcttgtttcctcgatcacctcggccaatcaggccatggacctgctcaatggggcgatgtttgagacttcggtctacggcgcagacttggcgcggcaactgatcgatgcagcgggtggccttgataccttcaatgcttcggtcaacagctacttcaccaacttctattcacaggaagagctgctgacatcgcgcacaggcttgctggccgatcaattcgaggccttgaatgtcgccatgccggccaccaaagaggccttccgcgatctggtcgaggcgcaggatctcagcacagaagagggcagggcgctatatgctggtttgcttaacctgtccggtgagttcgccaatctgagccagctttcggaagagctgtatggctctgcttcgcttgctgccagcggcatctctgcactggtgcgctccttctccagtgacgtcttgggggcggaggatgaactcgctgatgcgcaggccacagcactggtcgagtacaacaacgtgatgcggatcatggatctgcagatccgatcggcacaaagcgcgcgtgactcgatcaaaggcatcttcgatatcctctcggatgggctgggcgcccgcacaccgcttgagcgtgaggcgcagcgcctgcagcgcgaacggctgaaggcggagctttctgccggcatcgatgacccacagcggctgagagaggtcgtgcagggcttgaacgcgccggcagagcagttcttcagcacatacgcggacttcgcctatgattacgccagaacaagcgccctcatggatgagcagaagggaatcgcagaggaacagctcacagaggcagagcagcaactccgcgcactggaaaaccagaagcgcgcgatcgaggaactctatgggccactgctcgggatcgaccagaacaccgacaacctggaagaggccatggagcgcttggagactgccatgcttggcgtcgaggctgccatgctgcgggtcgaggactcgatgtatgcgcttgctcaggccctgctctctgcagtctcgggcatcgggggtacgggcggactgatggggatggggccggacgccttcgaccagttaagctttgaccgcaccaatggcattctgagcgagaaaggcgcgggcgtgcttgacggcgtagccgcgcagatcaacggcctttaccaagacgtctttggccggaatgtcgatgtggctggcttggacttctacggcgaccttctgcaatccggacaggtcaaggctggccgcatccagtacgatctgatgacctcgggcgaggctcggacgggggtgacaccgggctttggcaacatcggctctgcagcgcagcctgtcgatccggttgaggcactgtatggctctatgctgggccgtgcggcagatccagcgggtgtcgaattctggaagtctacgggcctgcagggcgaggcgcttatcaacgcattccgagatggggcgctggccgctggagacactcccagctttgatggtggtggttacaccggcagcggaccgcgtgttggcggccttgatggaaagggcggcttcctcgcaatgctgcatcctcgtgagacagttatcgatcacacgcgcaccaaccgttcgggtggccaagccgagggggatagcagcgcagtggttcaggaattgcgcaagatcggtgatcggctggcagttctggaatcccatgcgcgcgcaacgacttacaacacaggcaagtcgatgcgaacgcacaccaaatgggacagagatggtgtgccgaaggagcggacttaatgagcctgagaatgatcgagccagagacgattgacgacgccgcatttgtgtcttcgaccgttcccgaaactgacgcgcccgtctggaatgcatcaactgactatccgttctctgatccggacaacccagaagaggtgattgtcgaagaggggcaacatgccatttaccgcgctgtctctgcctcggggcccagccatggtggcgcagtcgatcctgccaccgacacggggaacaccaaatgggtgaaaatccgctctaccaaccgttggcgggtcttcgatgagtatatcggcgacccgagtgtccaggcaaatagcgcgcagtgggtgataaccgcgcccaacgtgatcgacagtgtggctttgttcgggctctacgccctgtcggtgacggtccttgttcgcgacagtggtggggccgaggtctacaatcagacatactcactgcaggatgagaacagtgtggttgatctctacacctacctcacaagtccgatcatcctcagtgaccgcttggtcatcgcagatattccgccctatgcgggtgcagaagtgacggttactgcggaggcacccggagaggacgtagaggtcgggcagatcgtgatcggccggaaagaagagatcggcgtcacgattgatgagatcccgctatcgatccaggacttctcccgcaaagagcgcgactctgattttggtcgggtgtcgctgttggagaaggactttgcagacgaaatgcccgtcgcatttgtcttcccgacctcgcgcgcttcctacctaaaaagtcgtctggcaagccgtcgcgccaaattgacggtctacagcagcgacgggccgtacaaggccaatgagttttccgtctacggattttaccagtcctttcaagtcgttccccgcatcgggagcgtttcggaaggcattctcgaactggagagtatcacatgagcgatccgacgatcacaccgccaccagatgcaccatcgcgtcagcagccttctaccttctctgcgcggggggatgcgttctttgcctggatggtcacatttgctgctgaggtaacaactgtcatttcgtgggtctcagaaaaggtcaccgaaatcgcgggcagtgtcagtgctgcgtctggcagtgctgctgcggctgcgggtagcgcctcggaagccgcacagtctgaactgattgcatcgggcgcggcgaactatcggggcgactatgatgctggtacgctgtacgcggtgggcgagagcgtgtcttacacgggcagcgtattcgtcaagaagaccactgcgcccgctggaacaaccccggttgacgggacggattggctggagctggggggcggtggtgctgcggacttccaagagttcacgtcaagcggtacgtggacaaagccagatggggccacgtttgttcgtgttgaggttgttggcggtggcggcggtggcggcaatatcacatcaagcggaaatgctggcggcggaggtgggggtgaggggagcctaggtttgttcttggcatcatctcttggctcgaccgagaccgtaacaattggcgctgggggtgctggtgcgcccagtggttcaactggtgatgcgtcggttggcggtgatagctcgtttggctctcatttgattggcaggggtggtggccttggtacgactggaagtgtcagcccgttcagtaatgagtgcgcttcagggtcgggtacgcaagccgtatacgtaacatcgactgaggccccggggcagggtggattttcaggtggatctgggtcaatggggtacaacggaggcggtgctgttattggcggcggtggcggtggtggatcacggtcttcgcaagctggatctggaggggtatcgcaactcgcgggtaatggcggggatgggtctggcgcggcatccactaagggcggtgacggacaatcaccgggtggaggtggaggcgcgtcgtctaatgatggcgggggcggcgacggcggcgatggtcgtgttcgggtatggagttggtaatcatgaaatacgcaatcattgaaaacggtgttgtagtgaacatcgcaaaggccgatgcgccacttgcgtataactgggttggtgcgggaggtgcgcgcattggggatctttgggacgggcaggcgttcacgccccctgcgccgcccccaccaacaaccgatgatgtaaacgccgaacgcgcccgacgcctcgtagcgggcacgactgtcactgtcaccggccacggccctgtggccctctctgggcgcgacgaagacacgcgcaacctgcagggccttgccttcgctgcgcagcttcgactctcccaaggcgatacaacacaccagaccaccttcagggacgctgagaacgccgaccacgttctgacgcccgcacaggtgcttgaaatgtggtccttgggctctgcctggatcgaacaggtctatgccgcgagttgggcgctgaaggacacgcaaggcggcatcccggcagactacgccaatgacgggtattggccgcagtaactggtacatccgccacggggacggatacttcaccacaactgaactcgcatgggagattggagccaagggctccggtctctttatttacgtgcctccgggctttgcctttgacgtctcgattcctcgctgggccgggtggatcttcgaccggcacgatccccgctatctgaaagctgctgcgctgcatgattacgccctccaccggctcggttgggggcgggtcagcgcggctgcacccttttccgaagcgctgcgcgccgctggcgtctcgcgcatccgcaggctggcaatggttctggccgtcactatccacaaatggagatgagcaaccgtgaaagacctgctgtttgcgattgaattctggctggctatggcggcggcaatcctgctgaagctgcgcgcctcgccccaaatcaccctattcggggctatcaccaccaccgcgtcagcgatctgctgcgctctggtgttcactgagccgcttatggattggctggagcttgatggcgaggtctacacctacgcagtttgcgctctgatcgcgctgaccggtgagcatatcgcccgacagatcctgtctcttggcattgaggatgccgtccgacttctgcgggggaacaagaaatgacgtggggcaagtttatcgtcggggcttggggcgccgtgcttgcgctgagccttatgaccagtgcgctacccgcgagctggtggtttcaggctggggaggtgcgcgttgccgacgctgcatccggcgagtgtccggaaatgcagtttgatcgcgagatcaaccggccatttaaggccgcctggaccgttaccatcatggggcgcgcatcctatggttgggccacctatcgcacctttcagggcgccaatgactatcggccggaaaaccagctgccggacaagctcgacctctgttggtggacgtgggcggatccgctcctcctgccaccgggggaataccgtgtgaacactctctggcgcatccatccgacgcagggcagggcacgcgagatcaggcgcaccagcaacacattcacgatcagcggaggctagaatgcagaagaacttcgaccgaagccttgattgggttctggcccatgaaggcggttatgtgaaccaccccaaggatccggggggagcaacgaatatgggcgtcacccagcgcacatatgatgccgatctgcggcgtcgtcagctgtcatctcgcagcgtgaaactgatcaccatggaagaagtgaaggcgatctatcgcagccaatactgggacaaggtgggtggcgatgagcttcccgggggcttggactactgcgtctttgacttcgcggtaaacagcggtgtttcgcgcgctgtgaagttcatgcagcgccagctgggcgtcaaggctgatgggattgtcggggtgaacaccatggaagccgtagaccgcgcggacgtcgaagggttgatccagtctatctgtcaggctcggttctcctggctgaagaagctgcgccactggggcacgtttggccgcggctggacacgccgggtgatgggggaaagcctcggcgttcaggcgcgcgacaccggcgtgatcgatcgcgctgtctacctccatcgtgaacttgccgtcattcacgcgccgtcctatcgcgaggatggttcgggggcccgcgccgaagacggtgaacggagcctgtctgccacggtcaaggagttgatcacgtctggtaaggggtggaccaatggcggcgctttgggcggcggcgcaatcgccctcacacagcttcaaggccctgttgcctacgccttggccgctgtgcttctgattgctgctgtgaccgccgctctgtacttcctgcgctcgcaggaggctgcggcatgaccggcttgatcgcattcctcatgcgcatggggttcggcggtatggtggacaaagccatcagccatttggagcgccgcgctgagcttcaaaacgaccgcgagaagctcaggagccaaacgactgtagagctggcccgtgaggccgtgaaagaagcccagatcatggccgactacaatcgcgccaagctcgcttttccgtggttttggctgttcgctgcgctcttcctcgtacccttggccgcatggtggagcgcagtcattctcgacagcatcttcggattcacttggtctgtcgcagatctgccaaccccgcaaatgcaggagtgggccggggatatgatccggtggctattctatgtcggcacgggcgtcggagcgctcaagtcgcttcgatgaagctggcataacctcaaagacgaaagccccgccatcgagcggggctttttcgtttctggggcggcctaacttgcgatgtctctattttggtggctttttgagagcattgccgtgaactacaacgataccgtgtttgtgttcaatggcgtcgacagactcgcttggcatgggtttgattgggaagagggtgcttggttcgttgctcaccctcagaattcattggagtgatttttcgtgaccgaattttttgcaaatgttggtgttgtgctgtcggcaattggacagggtttaaaggaagatccagctaagtttcagcacctaattggtgggggcttagcgttttttggtgtcttgctgacggtgtggacaacaggccgacgtctccgagagcagctcgctcacgctacgcagctggataaagcacgtcatgaaagggacttagaggtcaagcgtcgttccttgaagggagcactttctgctgaactttcagttatctcaggcttcctaagagacgaagatatccaactgcgtaagtggatcacccctgactggaagaccattgaagaattgcgcgtcgaacctgacgaggcaatcgatctcgaactgctagtaccagaagttaagaagaccgacacgctcaatagacctgaagccccttacaggttctctatgcctgagagggacgaaatctatagcgcgctcgtaggtgaacttgcggttctaagtgtagaagaaattcagacaatcatcgtcgcatacgacaagtttcagtcatttaaaagctgggttaaagaacattgtgatgaccaggtcgagcagacaaacgtctatattttttcgaagggaaaagacctgtgttctctccaagctcaaattgaagatgccaagacggaactagactggtacttgagtacgctgctagatgagattactttgaaggagccggcatctagcagcgcatcaaaatggtgtagttttgtatccccaagctacttggtattacttggtgcgagctttttgtttggattttgggtcaatagttcaactgttgagaatgaaccgacaagcactaatgagactaagtcgattaaatcgaaataggaggttgagaacatcaagtggatttttttacgcgtatctctgatgttgtttcctgcgtgctgcgcccagtttcagatcagagtgaaaatcacttttttgagttttcatggttgaagaagctaggcgcaacggatgtcgccacggccattgcaaccgtagtaattgctgtatttacggttgcgatgtttaggcttcataaagagcaacaaaagcacgatagagccgtagccagagcgaactaccaattttctctttttgaaaagaggcttgaggtctattttgaagttcaacgttttttctattcggcgtttgagcaccgtgttccacaaatggaaagtataggcgcgcttcacaagtcatccgctaccggaaccttcatttttggtgagaaagtcaaggcgttcctttctgattgtgtcaacaaagctatgcgacaccatcaattggaaacgcggcgcacgcgcaatgccgggatcgacgaggaaatagtacagaggtgcatggttgaacaagccgaaatcgaagattggttgtctggaaagggtgctcctgcctcgctcgagcagatgttttctgagtatctggagctccccgccgacctcccaagggagtaaagactgagtcaaactcagtgctcgtgctatttggaggcgttgatcttgcggcttttatgttctacatacgttctctctcgcggagagcgtaatccatgcctattgttcttcacatttggtgtgagtgtggccgtgtcggaaaggtcgagactgaccttcacgcagatcaccacgccatatttcgccgcgctcggtgtaaggtctgccgatcctacgggcggcgaggccgtccagtgaatgcagtgcttggttgggcagatgaatccaattggagtggtaaaggggtgggcgaggctcacaaagatggggcgggatgaacctaggtactttgattgtgcggtcatctggtcactgaggcggaaactatgcagctgccagagctattcggcggcattccttcgggcggccttctcgccgcttcttcctttctcataggcatccccgttggatggggggcgcgggtacctggcccgcaaacactgagggccagggttgtcttcttgtgacaccagtgctctgatctttaaaggaaacctgcctacttaaaatccccaggctttagccgtgcgggttcgagtcccgccgcccgtaccaactgacgaacagcccacaaattgcatcttgagcctcttatgagctctatgcgctggctatatggcagcatcgaacgtcgacgacatctgatgcagcatcggggttgtcgacgtaaaacgaggcggatcctgcgctgtatcagaggctcggcagcgccgtcctgagaggcagcatgccgtaagggcccgacgacatcttttcgaatatcaatccaattccggaggtggagccggattgtcctcgaaatatgggtaaacaaaccctgaatatctaaaaagcaagtcaatcatttgctcaggtttgcgcaaaaaagtatggagtttaataaattccctgctttccggcaaaggactccaacacatggccaatgcgtaccttcaaagcctccacaccagcgcgtctcttcggcagctcttgcagttgcgtccctttgaggcgcccgtgtcatctgaaatgggcgatagccggatcgagttggaggccgagaacggaacgcgccttgttcttgacgggtcgttctcttccgaggacgaagggagctgggtcatttatgctctggcgctctatgacggggccgacacgctggtgtcgatctcggacatggcgctctcctacgaggatttttttgcagccaatggcagagagcgcctgaacatggtgttcgaaggcgccgatgagatcacgtctaatctcggctctggtcttcgtatgaattttcaagccggcgatgacgttatcacccttggcttcggtgatgacgtgatcaacggcggtcgtggcaacgacacggtgtctgccggggcagggaatgacacgatcaacggcaacgcgggcagagaccagatcaatggccatgacggagacgacgtcctgacgggcggcggcggtcgcgacaagctaaacggtggtgttggaaacgacgttctgtccgggaacgcgggacgcgacaagctggtcggtggcactggcaatgacacgctctctggcggtgcggatgatgatgtcctgcgcggtggaaccggcgatgacgttctgaccggcggcgcgggcgcagatgtgttcaagtttcgggccaatgaccacaccaatgtgattacagacttcgaagttggcgtcgatcacatcgaggtcctcaaaggcgcgcgcggtatgcgtggcgttgattttgagcaaatcggcgacgatgtggcggtctatttcggcaacgtaaccgtgattgtccaagacaccacggtcgagttgatggacgacagcgacaacttcttgttctgaacgtaacttcgttgcgaacgtgacgccggagcactggcgcctttcctggtgggaatgggctcagggcgtccgttccgtgtttagatggcgtaggtctcaagaccccttgcagcagatcaattgatgcgatgcagccggcgctgcaccacctaaggcgttgcgcgccctgggcggcactaggtgttcggactgtcgtctgataccggcaagtgaaagcgtcatttccaatctgtgcggccatttgcatgcgtcgcgtgcccacacaggttcgactttacgcgttcagcagtcccacgatgcggcagggcgtgacttgcgatgagtaaactgatggcgtgcagattgatcaccttggctctcccgagccggacgcgttccagttgccacggcgccactcacacgaggtggccgttgcacagaagagtggcacatgagagccgatccagcccccacagacgtgcagattttgaaactgcgcgcgtttgatggctatctgggaggatctgtgacgccataaaaggaacgctgtgatgatcaacatgctggcctccgtttgggcgctcctggccggagtcgtgctcatcatgctgggcaacgggatgcattttaccttgatggggctgcgtggcggggtcgaggggttctcctcggccgagctctccatcgtgacctctggctatttcctcggctttttatcaggcgcgcgctttacaccgctcctgatccagcgcgtgggtcatgtgcgggtgtttgcagcgctcggcagctttatctcggcggcgctcattgcctttacgctatgggtcgagccctggacatggacgctcctgcggatcttgatcggtttttgcatgtctgggatttatgtggttgccgaaagctggctcaacaattccaccagcaatgagaaccggggcaagatgctctcggcctacatgctggcgcagacactaggcatcatcggcgcgcagggtttgctgacgcttggggatgctgccaatgctgcgctgtttattggcgcgtcgatcctggtgtccatttcctttgcgccgattttgctgtcgatccagcccgcccccctcgtcgaagtgaccaaacccggtggtttgaaggatctttttgcagcctcgccgcttgggaccgcaggtatttttgtgctgggcagtatctatgccagccagtccggcatgggcgcggtgtttggcagcgagatcggcctgagcgccaatcagatcgcgctgttcgtcgcgatgctgtttggtggtgccttgttcatgcaggtgccgattggctggctgtcggaccggctggatcggcgcaaggtcatctgtggcaccgcggcgcttggggccgccgcctgtggacttggctggttggcgcagagcccgcctgcctggctcggggttgacccgcttgttcccattatggcggcggcctttctcgcagggggcatgacaacgccgctctatgcgctcttgctggcctataccaatgacaatgtcgccgccgaggatatgcccgcgatctcgggcgggctggtctttacgtttgggcttggtgcgatcatcgggccgattgcggttggtctggcgatgaacgccacaggtccctttgcattctggatggtgcttggcgctgccttcctgatgatcacgctctatgcgctctaccggatgtcgcagagtgaggcgacgccggtctctgagaccgacgcctatgtcaacctcgtgccttcagcgaccattgtggcggttgaggatgcaaccacctgggcggcagagaatgcagacgtggacccgtctgagccctagagcgcctcaggtgatgtcagaactttgccagacgttgcgcgtggtgagatagctctcaagcccttcggtgccgccttcacgcccgtaaccactggatttcactccgccaaacggggtctccggcaaggaggcctcaagcgtattgatggagaaattgcccacttcgacctcgtcaatcatgcgcgcgatatagtccgcacgatttgtaaaagcataccctgccaacccgtaatccacagcgtttgcctgcgcgatggcttcgtcgaggttgcgcaccgtgttgagcaccgcgatgggaccaaagggctcttcgcgcatgatgcgcgcgctgtctggcacgtgtgtcagcaccgtgggggcaaagaaatatcccctttcccccacgcgcgtgccgccggtgcagagcgttgcgccttgggcgagggcgtcattaaccagatccgtcagaaccggaatgcgacgggcgttggcagttggtcccatttctatcccgtcgtgcatcccgttgcccacacgagttgccgccgcccgttgggtgaaggtggtcgcgaattcatcaaagatgtcttgatgcacaaagaaccgtgttggcgatgtgcagacctgtcccgcgttgcgcatcttgcggatggcgccgctcagggctgccttttgcacatcggtgtcctcgcagacgatcaccggtgcgtgcccgccaagctccatcaggacgcgggtgtcgctctgggcggcaagagctgtcaactggcggcccactgcggtggatccggtgagggccacaagccgcacgcagggctgcgggatgagataagccgaaatctccgccgggcggccaaataccagattgagcacaccatcgggcaggcccgcgtcctgaaacgcgcggacaatatggatcgccccggcgggggtttcctctgctgccttgaggatcagggagcagcccgacgcaagggcacccgcgatcttgcgtgcaggctggctcatggggaagttccatggtgaaaaggctgcgacaacgccaatggggtggtgatgcacggagatttttgtacccgccgccgaggggatcacgcgtccgtaagtgcgcatggcctctgccgcgtcccactcgaaaaactctgcgccgcgaatgacttccaaccgagcctgggccagtggtttgccatgttcggcggtaatggactgcgcgatctcttcttgccgatcccgcagaaggcgcgcagcgcgcaatatcagatccgcccggctgcgcggcggggtgttacgccagatctcgagccctttttgagccgctgccagcgcgtcctcaagatccgaaatccgcgcgcagggcaggcggcccagctcttcttccgtggccgggttcacaaccgagagggtctcaggcgtgtcgcgccatgtgccgccgataaagagtttgagatcgggatagttgcgcatttcggcctcattggtgtcagtcgcgatagggcaactctttcgcgcgcgtggcatcacctcaaccgaattgaacaaatacaggtatcacaatcagcgatatcaggacgcgggggtgagacgcgcaatctctgccgccgccgcatgaagcgccgccaagagcgcacctcccgccggcgagaggctctgctggccgcgaaacgagacgcccaccggaccagccccgaagggcaccacccaatccagcggcttcaggagcccgttttcaatgtcgagggccgcaacatgtgcgggcatcaagccgatgaaatcatggctgcgcagaagcgcgcgattggccagatacgatactgactcgatcgcggtttgcggcatgtactgatcctgacggataaaaaactgatcggtctgccgccggagcgtggtctcgatggggggaagaatccagccatgaggccggatatcgtcgaatgtcaggttgctttcacaggcaagggggtgttgcgggccggcgactgccaagatcctctcatcaaagaacttttcctgcgtgatattctcgcggtggcgatggctgggcaggcgcccgacgaccatgtcgatttcccccgacagaagaccgggcatcagcacctcatgtgtgccttcgacgatcttgatcgcgacctttggacggtcctgtagcacacgctcgaccgccatcggcaagagcgaaggcgatgcggccaagagcgtacccaccacgactcggccactgttgccttcattgagatcatcgagctcctgtgcggcgttggacacctgcgcgaatatcagtttgccatgtcggatcagcgagtctccaaagaccgtggggaccacgccgcgattggtgcgctcgaacagtttgacctcaaaatccacttcgagatcctggatcatctttgtcgctgctggttgcgagatgttgagatcgcgcgccgcgttctgaatgcttccatgctggcccacggcgacaagcaacctcagttggcgcagcttgagccgggtcagagcgcgttcaacgatacgggtgtggcgagtggccataggtggtcctcaggtgatgattgcggcgcaggcgcgctcgatggcggcgaccgcgctcatggcggccagcgccgagctgcgcggattgtcgggcagggcattgccttcgatgcggaaatgaaaactgccgaaatcgccatgcgcttgaatttcgtggatattcacgcgcgcgcttgggtcggcaatcagctcaacacgagtggtgtcaaacccggttcccgccagcgccactgctgcggcgacattggcgttcttggggtaggcgatggcggcctcgcgggcgctgccgcgaaaatgggtggccgggcttcttagtccgtccaattccagaacgtgctcggcgaccgagccccgccacgcctggggggggcttgcgcccgacatagaccacatcggcaagccctccgacctttgccgccctcaggcagtcgagcgcaccaatagcaccacttgccaaatgcagccgcgtcttgcccgcgcgggccgcccgttccagatctgcatggagggcgtcatcggcaagcgccccaagcgagagcgtcacaagtgcgatgccgcgttcaaggagggccgcgccgtgctgcaccagggcaccgtgtccggcacagtccaccatcaccgagatatcctgcggcaagttctgaacccgttgcacatagtccacgccatcgagcgcttcctgagcctctggaggcggcgccgagcgcgcaaggatcacatgtggccccaacccacgcaggcgcaactgctgagcgacatattgcgcgatggcacctgctccgatgatgccgattttcatggctgcctcctgtgctgcctgctgttttggccctagcctagcggaattcagatcggcttcggtatcagaatattggatatccagtttcggtcaatctggttggtttttccgcaggccatagccttagttgggcccaagatagccgctgccaagcgcgtgaaacatcggagccaagcccatgaaatacaaaaagaacgaagccaaggcctacgcccgtgaaaccatgcgcggcatttgggcggcggcgctaaatccctttgatgaggcgctaaaactcgacgaggcggggctgcggcgcaatatccgccattggatcgacgatctggacattcaaggcctgttcattgctggcaagcaaggcgagttctggtcgatgtccatcgaggagcgcaagcgcaacatgaccatcgcagtcgaggaatgcggcgacaaggcgggcacgatcatgtcgatctcggaccaaagcgtggacacggtgctcgaccttggtcgccatgctcagagctgcggggcggattatgttgtggtgcatgccccgatgctgagcttttgccacgaccgagatgaggttttgtataattattataaatacctgtgcgaccgtcttgatatcgggatcgccatgtggagccacccggacagcggttatctgatggcaccggagacatgtgcgcgcattgccgagctgccgaatatcatggcgatcaaatactctgttccgcgcgagatgtatgcccgactgacgcagatggtcggggacaagatccttgtgtcgacctcggcagaagacgattggctcgacaatatcgaggatctgggttggcagctctatctgtgttcctcgccgccctatcttctgcagaccaaggccgaccggcgcatgcatgaatacaccgaactggcctttgccggaaaattcgaagccgcccggaagctgcgcaacagcctggaacccgtgcgcaatgcgttgcgcgacaccaaacccgctggcaagccgaccgcgcatggcaaatactggcaggaactcttgggacagaccgggggacgtgtgcgtcatccgatgctggagctcaccgaggccgagaaagccgccaccagtgccgcctttgaggattgtggcctcctgcgttgatcccgcatcatgatcggagaggggctggcgatactggccgcgctgtcctacggcggcgcggctgtatcgattgtgcaaagcaaacccggagcgcaggcagacaacggcgtcttcctgtcggtgctggtgctgtttgggatctccggcgggatttggctcggcagtggcgttgtgccgctctcggcgctttggcagccagaagggctctgcgctattggggtctttgctcttgcggggctgagcgcaaacggtctggcgcgatggtcgatgtatcgcgcgaccgagcggattggtgccgtttccgcaactctgctacgccgtctcacccccatctttgtactgccgtttgcctatctgctcctcgagcaaattcctgatgtggcaacgctttggggcggctgtgtcatcctgatcggggtctggatctacctgcgtccgagcacacaaccggctgcgggaggcctgtcatccggggtgatgttggggctactttcgccgttggcctatgcctttgcctatagcttgcgcgggctgggattgaacggactgccagacccggcgcttggcacctttgttggtgcaggagccgcgatcatctggagtttggcgcgccacggtctgcaccggtcgccagagcgggggctgaggtatctgctgacggatcgcagtcccgcgcattggcgtacggctctggccctgagtgtcggacaactcctacagttctttgccctaaagataagcgctgtggcgaccgtggccctccttgggactttggaagtgctattctctgccgtctttatatggctcatctatgggcgcgagagtgttgatattaagcgcttatttgctgctaccctttgtgcgctcggcgggactgccctgatgatattggcctgagatcggtatcagcaatctggatacccactttcgcggaaataaatatttcgcatgggcaatatttcctagggtagcgataagcgcaacccaacgcccccaagtgccgggggctgcacgcgggagagacccatgcctcagcatccgacattgaagccctttaactttgagaaatgggtggaacaaaacgcggataagctgcgccctccggtgggcaatcagctgctgcacaaggaaggcgacatgatcgtgatggttgtgggagggcccaacacccgcatggattttcatgacgacccggtggaggaatggttcttccagcaaaagggcgacatgatgctcaagattgccgatgggggcaaaatctatgacgttccagtgcgggaaggcgaggtctttatgctgccgccccatgttcgccacgcgccgcaacgtccgcaggagggctcggtggggatcgtcgtagaggcgccgcgccagcccggtatgaaagaagggttcgagtggtactgttttgagtgcgaggggctcgttcaccgcgaagaggtggcccttgatggacccgaggggatcgtgactgcgctcccaaaaatctacagcaaattccacgacagtctcgaggctcgcacctgtccacactgcggcgcgctccatcccggcaaggggaagccacctgcagattgggtgcagctttgatgatcaaaacaataagcaaaacagggaattggccaatgaatgtcatttggaaaacgatcacaggcgccgcatttgtgctgtcgagtacggttgccccccaggccaaggagtttcgtcttggcctgatcacaccgccgccacacatctggaccaaagctgccgaagcctttggcgcagatatcgccaaggccagcgatggggcccatagcgtcaccgtgtttcccgcgcgccagctcggcaacgaggcagagatgctgcaacaattgcagaccggcgccctggacatggcgtttatgacggtagccgaagtgtccaatcgcgccccggattttggcgcgctttatgcgccctatctcgcggaggacatcgcccacgcaggccgaatcctgcgcagtgaaaccgccacctccatgctggcacaattgcctgccaaaacaggtgttgtcggcacgggatatggcatggcggggctgcgtcagatcgtgacccgtggtgaggtcaacagtgttgacgatcttgcgggtctgaagctgcggatcacgcccttcgagccgatcctcgatttctacaatgccattggcgccgccccaacgccgatgccgctgccctcggtctatgatgcgctggccaatggtcaggtcgatgcgatcgacatggatgccgaactgatctgggtgctcaaatactacgaacatgcggatacggttgtgcaatcaaaccacatgatgttcccgatggtggggcttgtctctgcacgggtctgggcgggcctttcggaggcggaccgtgccctgatcggagatctcatggcgcgccatgtagacagcacgatcgatacctatgtggagaaagaacagctctggctggatgagatcaaggcgacggggcgcacctataagacggtcgatgcggcattctttggtgaggcggtcgagagctggaatgcggtttggtcggagcgctcgcaaatgctcgggccattacgcgcagcggctgcggccaccgcgcgggactgaccctcaacagccatcggcggcggcccctcgcgagaggggcgcgccagtgaggcggagagcgaaatgatcggacgtatctcggcagcctgggcacgctgtgagctggcgctggccgcatgtcttgcggtctccatcacggcgctgatcctgctcaatgtggtgacgcgaagccttggcgcggccttgttctgggtggatgaactggcgatttatgcgatggcctggatggcctttctgggcgcctccgcagccgtgcattttggccattcggtcgctgtgacgatcctcaccgatactttgcctcttgcgcttcagaagatcgcggcacagctggtggacgggatcgttttggggtttgcgcttgcgatgctgtggttttgctggcgctggtttgcgccgctggccctgatccagagcggctttgatctggcagcttttcagggcgcgacgttcaactttgtctacgccgaacccaccaccaccctcggccttcagaaacattgggtctggtccgtgatgtgggtcttcgcgctcgggatgacactgcacagttttgcaaatctgatcgggcagggtgccaacccagaggatgaccgttcatgacgcctttgatctttgctttcaaactcttgatcgcggtgccggtggccttggttctggcgctcacggccatctggtacatctgggagagcggcaacacggtcctctatgacagttttgcgcaaaagatgttctccgggctagagagttacggcctgctggcgatcccgctgttcatgctgacgggggagatgatgaacgaaggcggcatgacccgccgcttgatcaatgcggctcgggtctttgtcggcgggtttcgcggtgggctcgcctatatcaacctgctgaccaatatgttcatggcggcgatcatcggatcggccacagcgcagatcgcggtgatggcccgtgcgatgacgccagagatggaaaaagaggggtatgacacgggctttgccgctgccacgacagcggcgggcgggttgcttgcgccggtcatcccgccgtcgatgatgttcgtgatcttcggcgtactggcccaggttccgattggcgagatgtttcttgcaggcctcattccggggatgatgcttgcaggggcctttgcgctggtgatcttcgggatcggtgtcgccacaggctttccaaagggcagctggttcaccgcgccagaggcgttctcggcgcttctatattgcttgcccgcagcgctgatcccctgtgcgatcatcggcggtgtggtgtttgggattgcaaccccgaccgagagcgctgcaatcgcctctctgctggcctttgggatggggtggctggtctatggcgaactgaagcctgcggccctctttgcgatgttccgtcgcactgccatcaacgcctcgatgatcatcttcatgatcgcctgtgccaatgtctttggctgggtcatcatctacgaggccctgccacaaaagctcgcggcgctgatcacctcgatcaccagtgacccgtttctgtttctgctgatcgtcaatctgatcctgctgctgatcgggatgctggtggatgggatcgccgccgtgatcctgatctcgcccatcttgttgccgatcgcggtaaaccactatgacatcagcgcccatcaatttggtgtcgtcatgtgcctgaacctcgtgctgggcttgctgacaccgcccgttggggtcgggctttatattgcgtcttccatgagtggcgccacgcccggccagatcctgcgctccctctggccattccttttggcggtagcgctaatccttgtcctattgagccggtttcctgtgttgtcgaccgcgtttctatagttcaggtgatctaaatggggcgcaaatggcgctgaattcattcaaattgaaattactaaatgggctcgtatgagatgtttttgttgcgcgtactggccaacggacaaaagggccgagcctgaaaatttctgaaaaattattgtcaagcgatcccggcgcgttgtgctttgttggggtgttgcgtcacctaggtgcgcgctccacactggattgcaacaccatgtaatcatttactcattcttaagtgcgcatcgatagttctgcggcatcagctttttaacgaagcgacgtttggccaagtcggcaccgtgtttcattgttcccaatttttttctcagtcgtcttggcctcccataaaatggagagaaaagtgaccttaaaaaggttttcccaagcaggagccctgggggcaattgcgctgatgcctgcggcagccttttcgttcgatttcggcgagtatcattttgaatatgcccggctggggtcgtgtgatgttgaccttcgtgtcgaccctcatcgcgaagaggcgtttttgtttctattaggggtggaatttcaagctgcaggtggggcagagctttggagcggaaattggcacccgatgcccgaagtgaccgctgaaaatctcgctgattgcctgggagtcccatcgtcgctggttgaagtcactcggcaggaagggcctgtgttcgattccgatagtagcgagtccttccggctgacaacctacatcgggttgacgttcgatctgcaaacagactcgatggaacttgccgcgggtacctacgagttctccactgatacaaatggggagatcagatacctagggttcactgatcggattgcgcccgagctgacaccgccaagcgatcagtccgcgactaccgatgcgggacaggcgacagcgtctttgaatgtgacctcccttggctccgcgtcagataacgcagattcgagcatcgacatcgcctacgccatcggcagtacgacgatcaccggctcctacgacttcccagttggagagacgaccgtgacgatgtctgcgtctgatgctgctggcaatgatgccacgccggtgacgttcaaagttgtcgtctccgatgaggaaagccccgccctgactgcgccttccaaccaggaaatcacgaccgaatcgggggcctctaccgcatcccttgatgttacggacctcggctcggtcagtgacaacgtagatagcagcctcagcatcacctattatgtcggcagcgccgcgctctccggggcgtatgactttccgcttggcgacaccactgtgacaatgatggcatccgatgccgccgggaattctgcgcaggacacattcaccgtgaccgtaaacccgggcgatgtgaccgcgccggtcctgacagcgccttcggatcagactgcggcaactgccgtgggggcaagcacagccgcgcttgatgttacaagccttggttcgggaagcgacaacctcgatgacgtggtgacgatcacctacaaggtcggcgacaccgttttggacggcgcctatgacttcccgattggcgagacgactgtgacgatggatgccaccgatgcggcaggcaatgcggcagcgccagtgtcgtttacagtgacgatcacccccggcgacgcgaccgcgccggtcctgacagcgccttcggatcagactgcggcaactgccgtgggggcaagcacagccgcgcttgatgttacaagccttggctcgggcagcgacaacctcgatgacgtggtgacgatcacctacaaggtcggcgacactgtgttggacggcgcctatgacttcccgattggcgagacgactgtgacgatggatgccaccgatgcggcaggcaatgcggcagcgcaagtgtcgtttactgtgacgatcacgcccggcgacgcgaccgcgccggtcctgacagcgccttcggatcagactgcggcaactgccgtgggggcaagcacagccgcgcttgatgttacaagccttggttcgggcagcgacaacctcgatgacgtggtgacgatcatctacaaggtcggcgacaccgtgttggacggcgcctatgatttcccgattggcgagaccactgtgaccatggatgccaccgatgcggcaggcaatgcggcagcgcaagtgtcgtttacagtgacgatcacccccggcgacgcgaccgcgccggtcctgacagcgccctcggatcagacggcatccaccgagccagacgcaacctccacatcgttggacgtcacaagccttggctcggggagcgacgacatagatgactcggtgacgatcatctacaaggtcggcgacactgtgttggacggcgcctatgacttcccgattggcgagacgactgtgacgatggatgccaccgatgtggcaggcaatgacgcggtgcaggtttcttttgtggtcacggtccttgatgggacgccgccgccagagcctacgatcaccgatgtggtcgtgaatgacgataaaaccctgacggtgacaggcaccgcgcaggccggggcaaccgtcacagtcaccttccctgatggttccacggttgagacaactgcgtctggcgccgcgacctcggcaaaagggcgcgtgaaccgtgactcaacggcggtctttgcggcggcgaccggaacctatacggccacctctgcaaccccgcaaaccagcggcgacgtctcggcctattcgtccacaacggggggcggcgcctcggcttccgcttcggttgcggttgatgcgacttcgcccgatgtggtgctgagcggcggcccgagcgacggcatcagcgccaatgagagctttaccgtcaccgcaaccttcaacgaggtagtgacaggctttagcgcgagcgatgttgtggcacaaaacgccagcgtcaccgccgtgacagggtcgggcagcgactataccatcagcttgcgcgcaaccggcgcagggactgtcaccgtcgaagtgcccgcaggagcggcagaggacgcagcgtcaaacccgacgaatgcctcgaacacgcttgtctttgacgacaccacggttgtggaaacccagaagcagattgccggcttcctctacaatcgcgccaaccagctgatctcgaaccagccagagctcattggtttcctgtcgcagaccgggatcggatcgggaacgcttgatgcctatgtcacgcggggcgccgggaacttcaatctcgcgtcgcgtggcggtctgccggtttggttccgcctgcaaggcagctggagcgaggatgacacaaccgaggcgcgctatgcctttggggcggtcggcgggcatctgaccctgagcgatcggctgctggttggggcgatgctccagttcgaccatctgcatcaggatcaaggcagccgccgtgtcgaaggcaccggttggatggtggggccctatgcggtggcgcagatctcggatcaggccctctacgtcgaaggacgcgtgctctatggccaatcctcaaacaaggttgcgccctttggcacctatgaggattcctttgacacaacgcgcgtcttggcccaactgcgggtcgcgggggacatcaagaagggcgacacgatcttcacgccctatatcgacgccgcttacgccaacgaggagcaggacgcctatgtcgacagtctcggcaacagcatcggggcgcagaaaatccacctgcgtcaggcaagctttggtgtgggctttgccacgcccctgccgattggcgcagcagaccaagcggtgctgaccggcggtctggcgggcgtctggtcctccaccagtggcacggcggtcgcggacacggtgttgccaagctacgcgggatggcgcgccaaactggacctcggtttgcgctatgtctgggagaacggcagcaaactcgcactctccgcgcgctacgacgggcttggcagcgcgggctacaaggacgtcggtctcagcctggattacagcctgaagttctgagcctctggcctgtaggccggatcaacatgaaagggggcgcgcaggtgccccctttttttgtcagcccgcgtcccactggcagattccgcgcggatagcgtatgcgaaacacaccgtgcatcaagaaaccagagggagcggatggcaatagagataccagttccagccgtcgcgcccgctttgccaaaacccttcaagacgcagcttctcaaatgggtgggcaacaagcagcgctttgcccatgaaatcgttgcacatcttcccaaggactacggcacctattttgaaccgtttctgggcgcaggcggggtgatggcgaacctgcaaccacatcgcgcgctgggctcagacatctatcctcccctggtcgagatctggcaggcgctgcgcgaggaccccgcgcgcctcaacgcgtggtatcagagccgctatgaccgcttcatgaccggtgacagggttgccacctatgaggcgatcaaggcccgctacaatgacacccccaacggtgccgatttcctgtttctctgccgcgcctgttacggtggggtggtgcgctttcgtcgcaaggacggatatatgtcgaccccctgcggcagccacccggtgatgaaacctcacaaatttgccgaacgggtcgagatgtggcgcgcgcgcatgaaaggcgcaagttttgcctgtctggactaccgctctgccatggcgcaggcgcgcgcgggcgatgtgatttactgcgacccgccttacgctcattcgcaaaccatcctttacggcgcccaggcgtttcgcctcgaagaattgtttgcggcgatcgcggcctgcaaggcacgcggcgtcagggtcgcgctttcgatcgatggcaccaagaaatccggcgatatctattgcgacatcgccatccctgagggtctgtttgaacgcgagatcctcgtcaatatggggcaatccatgctcaaacgctttcagatgagcgggcagcgcatggagagcgaagccgtgcgcgaccgcctgcttttgacctactaagtccttcttctaacgagaaatatcccgggggaggcccgacaagggccgggggcagcgcccccagggcttctgcgctgcgttcacgcgttcaagaaaccgcgtacggtggcctcgaactcgcgtggtttttccgcgtggagccaatggcctgcaccggggatcttggcaaagcgcgccgctggaaacaggcgtttgatctgcgggcggtgctctggcagcacataatccgaatgcgccccggtcagaaacagcgccgtcccatcccaatgggtctccacctccggaaacgacagaatatgcggcatctcccgctccaaggtatcgaggttgaggcgccagctcttgttctccacatccagagattgggtgaaaaagctttgcaacatcgcatccacaccagccgccgccagctgctcttgggcgtccgagcgccgcgtcacgcgcgcaaggtcgacactgcgcatggcagtgatgaaatgcgcctgggtgtgctgatagctgaccggtgcgatatcggcgaccaccaggcggttgaccgcctcgggatggcgcagcgccagcatcatcgcggccttgcctcccatcgagtgcccgaccacatccatgcgcccgccgtgggccgcaatcacttcggccagatcctcggccagatcgacatagctgtggctctgggtcttggggctcagcccgtggttgcgcatgtccaccgcgatcacttgccgctcgtccgcgagtcgtttggcaatcaccccccagttgcgcccggagccatagaggccatgggcaatcaagaggggcggttggtcggtcggggtgccatgtatgatcgtgttcagcataacggggtgatagccctctctgcaggcagtgtcagccccaaaccgcgcagcagcattgagatcccgcgccgccgcggctaaggtcgcgcgcatcgcgtcaaagccttggggatgccgtctttatgaatgaaacgcttcagagcgagttggagcagctgcgtgtccttttggagaaacgcctgaggctctcaggtccgctttcggacagtttgcgccgggcgcgccgtcatgtgccgcatcgtctgcgcaaggccgcagatgatctattgcgcgcagaagaacgctttgaccatccccggcttgcgctcaccttggacgaggacgcgctcgtcaaaaaagcccgccgtctcagggcttatctgacagagctcgacctcaaggaccggcgcaaggggcggcttttggacatggctgcgacctctgcctttgcgatcctctgtgttattgtgctgatggtggttgtgctgcgctggcggggtttcgtctgatcccggatgggccagacggccggaaggcctctgccgacagtgcatcgcgcaccacgagggtcacggtgacaaagctcacatagagcagcaggtaccagctgcccatcttggccaagctgacccagtggtcgctgtcctgtcccgcatagagccaggttcgcgtacgcgtgcccacgttctcggccacccagaggaaaaaactcgacaggaaggccgctagcggcaagggcatccaataggcatggccgccgatgtaaaaccagatgcgggtgcggataaagatcaccaccgttgcaacaaagagcgcgagccgtatgtcgggcaggaagtggtggctgaagaaattcacatagatcaggaccgcgaggcagcttgccatccatgtcggcgggtagggcgcaaaacgcatgtcaaacagccggatgacccgcgccatgtaagaccctactgacgcatacataaaacccgaaaacagcggaacgccccagagcttcaggacgcccgcgcccggataggcccagcttccggcctgaaccttgaagatttccatgatcgtgccggtgagatgaaacaacaagatcacccgcgcttcgcgggtgctttccatgccggtgatcaggaacactgcctgcagcccgagcgcatagatcagcagcgcatcatagcgcgccagcgcccaatctgcctgccagatgcggctggagaccaagagcccgcccaggagcaagatcccgaagattgccgcccaaccttgtttgagcgtgaacatcaccagttcagacaggtaatgtggcaggcgcgcgcggcaccagtcgccaagggcgcgttcaagacggcgcgtgcgattcatggggattggattttgggcaggttcagtcatgaccgagaaatgacgggaaaagtctcatcaagtccacgcgaaactccaagatcagtcaccgcacggcgaggatttgcattcccggactgcggcagcctatagagagggggacatgaacgcggttcaagaaatgggcgaataaaatgacatccaaggcagagcagcgcagggcggagctgcgcgaaaaactggtgggcgctgcagaggcgcgcattcgcgaggctggcgtgacatcgctgcgggcgcgtgatctggccaaggatgcgggctgcgcggttggggcgatctacaacgcctttgacgatctgacggccttggtgatggcggtcaacgggcgcacgtttcagcgtctcggggccgaggttgaagccgcggtcaaagcctccgaaggggcctcgcccagcgacaggctgatccgaatgagcgaagcctatctggattttgcaagtgcaaacaatctcttgtggcgcgctctgtttgacctggaactccccgccgatggggaggtgcctgattggtatcgcgccgcattggatcggctgtttcagcacattgccggtcctgtggccgaacttttcccagatcagccgcagcaggaacaggcgctcacggtgcgggcgctgttttcctcggtgcatgggattgtcttgctggggctcgaaaatcgtatttcgggcgtcccgccgcaagaaatccggcgcatgattgcgctggtgttgtcgcgcctgacgatgaagtaaatctccaattccgtgaacgctgttcatttttagcttgaacgacgttcacaaataccgtacatcccccttatgaacaatgttcacgaatggaggatggaacgtgctctctacgcttagaactctgatgatcggggccaaccggcgcgccgaaggcgagcttcgccagcagttttcaatcgagctgatcgaagaaaagatcgctcaggcgaatgatgatctgaaggcagcaaaatcaacgctggtcagtttgatccagaaagaacgcgccgaggggcgccagatcgcaacccttgacgcgcggatcgcggatttgacgcaacgcgcgcaggcggctctggcagacgggcgcgaggacctggccacgacggccgcagccgcgatttccgagatggaaaatgagcgcagactgcgacacgagacccagactcgtctcgaagcgcgcatcctgaggttgcgtcaatcggtcgaaaccgccagccgtcgcctgattgacctgcgccaaggggcaatcgctgccaagtccgtgcggggagagcatcgcgcgcaggccgcgctgggacggtccttggaccgtcagcccatggatgaggccgccgagcttattgccgaggttctggggcaggaggatccgttcgaggcttctgaaattctgggcgagatcgaagcgggtctcgcaccgcaatcggtggcggatcaattggcagacgcgggctttggcgcagccacccgcagcacgccgcaggatgtgctgcgtcgtctgaaggctgcgccctgatcgcagtccagccgatgcatctgcctcagctgtatcgtgtaagcctcagtaaaatttcaagaaacaccagtcgaaggaactgacttatgtccaacatgcgcaatgaaaacgccctgatcaccaacctcaacatcgctggcgtcgtgattgcctacgcaatgctcgggatttcgctgtggctctcgaccgaagtgccgctttcgaccaaaggctattgggcgatggggattttgctgctgacgctgagcctcatcaacgtggtgaaataccgtttcgacatccgccagagcgaagatcgcattcgccggatcgaggatattcgcaacgagcgcatgcttgaggacgcgttgaaagatcccgcatccgaggtctgatctctgtctcgaaacagacctatggggccggagccagctagatcagcggctctggcccaatcgcttcgatcaactcggggccatcgtcttcgatgccaaaccgagggacttgatgataccgcaggcgcccgtcccacgcggtgccaagctccgatttcgcgcgcgtgcggtcgatctctccgctgagccagtcctgaagctgaccctcggccagaatgaccggcgagcgcgggtgcagatgcgctgtttgcgcaagtgcagggcgcgtcaggatcgaacaggttctgagcccgcttgccagccgcgtttgcaacccggcaaaaaacagcatcggcgcattgctttgcgccgtgatccaccagggctgtttctgacctttgtcgccggtccattcaaaatatccgcttgccgggatcgcgcaacggctggcaccgcgaaaacttggcagtgtgtcggcggtctcgatcttggcgttgaacgtcgtggctctccagtccgagggcgcgcccttgaaccagcttggcaccagccaccacctggcatgttcagccaccagggcaccttggcgcaggaacagcgcctcaacggtctgcgtgggttttacgttccagctgggggcaagcggctctgagcggtcctcgcgatatacatcgagccagtcaaactcgccgcgctgccaggcgacaaagtctttccagctgagttgaggaaggccgattctaccacacatgcccgtatgatagcgcgggtatgggaggcgagccacgccaggcggaccggcgcaaaaaaaaccgccgcgcccgaaagagcgcggcggtgcagagcaacctcgggtgaggcgccagatcagaggtttggatagagcgggaagcggccgcagagcgccgcgactttgccacgcacggcttcttcgaccgcggcgttgccgtcctcgccattggctgcgagaccgtcgaccacctcgacgatcagacgggcgatctcgcggaactcttcctcaccaaacccacgggtcgtgcctgcaggcgtgccgaggcggataccggaggtcacggtgggcttttccgggtcgaacgggatgccgttcttgttggtggtgatatgcgcacggccgagcgctttgtcgacgatgttgcccgtcacgcctttggggcgcaggtctaccagcatcacatgggtgtcggtgccgccggtcacgatgtccagaccgcctttgatcagctcatccgccagcgcaaccgcgtttgcacgcacttgtttctggtaggatttgaactcgggcttcagcgcctcgccaaaggcggcggctttgcctgcgatcacgtgcatcagcgggccgccctgaatgcccgggaagatggcagagttgaatttctttgccagatccgggttgttggtcaggatcatgccgccacgcgggccgcgcagggtcttgtgggtggtggtggtggccacatcagcatgcgggaagggcgaaggatgctcgcctgctgcaacaagaccggcgaaatgcgccatgtccaccagcagataggcaccgacgctgtcagcgatttcacggaacttggcaaaatcgatctggcgcgggatcgcggagccgccggcgatgatcagcttgggctggtgctcggtcgcaagtgcctgaacctgatcatagtcgatcaggcagtcggattcgcgcacgccgtagtgcaccgcgttgaaccatttgccggactggtttggcgctgcaccatgggtgaggtgaccgccggacgcgagatccatgccgaggatggtgtcgccgggcttcagaatcgcctggaacacgccctggttcgcctgcgagccggagttgggctgcacattggcaaattcgcagttgaacagctgcttggcccggtcgatggcgaggttttcggccacgtcgacatactggcagccgccataatagcgacggcccgggtagccttcggcatacttgttggtcagcacagagccctgcgcttccatgacggcagcagagacgatgttttcggaggcgatcagctcgatctcgtcgcgctgacgaccgagttcatcggtgattgcgccaaaaagctctgggtcgcgctcagagaggctttgggtgaagaaaccggggtcgcgggtcgcgtcagtcatattggctccgtctggttggggcttggtatttgcgagatttcctataggaaacttcacggatctgaaaggctgtaaagcgacgaaacgcatcaggtgaacggcaactctggtcaacggggaaaacctgtgcttgtttcggaaccgtttggaccctaccggaaacaggatcgcgccttatgagaatcgcatttctggccagcgaggcccctttggcgcagacggctctttctgttctgagcaaacgctacggatctgtcgccgtcgaggccgcagatgttatcgtggcgctggggggcgatgggttcatgttgcacacgctgcgtgacaccgttgatctcaatattccgatctacgggatgaaccgcggcacggttggtttcttgatgaacagctttggcgaggacgcgcttctggaacggctggaggccgccaatgaagagatcatccaccccttgcggatgcgggcgcaggaccgggccggggtcatgcatgaggcgatggcgatcaacgaagtgtccttgctgcggcagggtccgcaggcggccaagctcaagatctcggttgatgggcggcagcggatggcggagctggtttgcgatggcgcgctggtgtcgacgcctgcgggctccaccgcctataatttttcggcgcacggcccgatcctgcccatcggggcggatgtgctggcgctgacggcgattgcggcctttcgcccaaggcgctggcgcggcgcgttgctgcccagtggggccaccgtgcgttttgacgtgatcgatgcggccaagcgacccgtgatggcggaagcggattcgatttccttcaaggagatcgactgggttgaaatccagagtgaacgccggatcagccacaagatcctgtttgaccccggtcatgggcttgaggaacggctgatctcggaacagttcaactgaggccgcgctggcgcgcgacaggttgagccttggacccatgggtccaaggccgtgcctccggcggggatatttctggttagaagaaggcatcggcgcgcacaggtcgtcgctcagcgagtcatggactgcatgtgatcccagagcggggcagccatctgtccgatgcgatcctcaatggcgatagcggcatccacggccatgtcttcgcgccagcgcggcgccacgatctgcacgttgatgggttgtaggccctttggaagctgtgcgaggcgcgcaggcacgcaggcggctggtaggcccatgtaattcatggcgtaggagtagaccgcacagcccagcacatcatgggcgcccgcgacaccttcgcgatcgcgatcaggcgcaaagaacggatgcggcaggaagggcgtcagcaccagcgggtaatcggccatgaacatggcccattggcgggcgtaatggctgcgtttggcgtacatcttgagcagctcatcaccgtggaagggcgggaactcctgaaaataggtgtcaaacatcgtgcggatgatctcggagcccatggcgtcgaggtcgggtttcatcaacgcatgaatttcgcccatgagcgcgcgatagcctgtgcgcccggcctcaaagacattggggggctcgatctcctcgacgatatacccggcatccatcagcgcgtcgcgcgccgccaagagcgccgcgtccacctcggggtggaggtcatagccatgggtgttgcgggtgaaggcgaccttgaccgggccgtccggcgccgccccgcgccacggcaccggggcgtggaaggggtcgcgaatgtcgggcgcgatcatcgcgggcatcgagaggtgcaaatcgcgcgcggagcgggtcatcaggccttgaacgctcatcaattgggccaataggccgcgttcggctttttggctggggttccaggcgggcacgcgcccaaagcccggcttcacggtgaccgcgccattggccgctgcgggaaagcgcagggagccgccaatgtcattgccatgtgccagcggaccaatccccgccatcactgcagcgccgccaccgcccgaagagccgccgggcgagatatgctgcccccagggattatgggtgcgcccataaaggggattgtcggtatcggcgcggaaggaaaactctggcgtgttgctgcgcccgatcaccacagctccggcgcgttctaggttttgcaccaccggcgcgtcatcgggggcgatcagatccttgagcgcaggaatgccgtttgatgtcggatgcccggtttgatcgatgttgatcttgatggtgacagggacgccgtgcaaggggccgcgcagcgcctttggcgtgctgtcgagaacttcggcccgcgccagagcctcgtcccggagatcctcgaccaccgcattgagcgccgggttcacctgatccatccgcgcaagcacagaggtcaccgcctctgttggactgatgtcgccgttgcgggtctgggtggacaattcttctgcgctcaggcgccaaagctcttgatttgacatgttaacaatctccttgaggcggagactagtgtccgtttgaggggctgggaaggggggaatttaacttgttatttggggattgtgcttgatcctgcctgtggaagcgcgaaggctgttcccggagcgatattttttgaaagaaccccaaaacatgaatagattaatcgcgttttctgcggtgtgtgccatctctgttggctctgctttgccgctgcaggcggagagctttgtatctgtattgcaggtcattgaggaaatgggcgagacgccctatgaatgcgacggctatgatcccgccacgcaatcgtgctccggtttgtcctacatgcgcaccgaggaggggatcatctacaacgcgtcgtggtttgcgatcgagaaccccgccggtgagccgtgggttttcctggcttcttccgaatacgagtttctgttcggctggggctgcccctcgaattgggggcaggcgccgacgatccgctacgttgatggcggggacccggatctcggcccgcaatatgctgagctgatccagagtcagctcaatgagagttacgatccggatgcgccttgtgctgggtattacccggatggaccgcagcgctaccggatcgaataccgttaccgcaacggagagctggcagagcggccggacagccatgtgcgtttcttctttgagccaaaggagctgcgaccttgacctgatttctgatctctttgcggaggatttcttggaacaatcccggaggcgggacgttgagaggtcaagcagcgagcgtctgtggacgcactgtgatccaacctgcaaaggagcagagatcatgaattgggatattatcgaaggcaaatggaagcagctcaaaggcgaggcgcaaacccagtggggcaagctcagcgaggatgagatcgatcaggcggccggcgaccgagacaaactcgctggtctgctgcaggagcgctatggtttggcgcgcgaagatgctgagcgtcagatcgatgcctttgcagagagcctgaaggaaaagatctgatacgagcaccgcgctcatcgcagcgtggacgaggaagcggccccaaggcgggccgcttttctttgttctgtcctacccttgggcgtagccgaggctttggagggcggttttgatctcgtccaggatggccggatcatcgatggtcgcgggcatcttccactcggtgttgtccgcgatggagaccatggtgccccgcaggatcttgcccgagcgcgtcttggggaggcgatccaccacgcaggcgagtttgaacgccgccacggggccgatcttttcgcgcaccagtttgaccacctcggcggtgatctcggaatgaggacgattgcagccggagttgaggcagaggaagcccaggggcatctgccccttcagttggtctgccacgccgatcacggcgcattctgcaacatccgggtggcccgcaagcacctcttccatcgcgcctgtagacaggcgatgtccggccacgttgatgacgtcatcggtgcgcgccatgatgtagagatacccatcctcatccatcatccctgcatcgcccgtctcgtagtagccaggaaaggtggtgaggtagcttttcttgaaccgctcttcggcgttccagagcgttggcagcgtgcctgggggcagggggagtttgaccgcaatcgcacccagctctccgggggcgacaggatggcccccctcgtcaaggatctgcacgtcatagccgggcattggcacggcgggggagccgagcttcaccgggagcgtttcaataccaagcggattggcagcaatcgaccagccggtttctgtctgccaccagtgatcgatgactggcacgcccagttggtcctgcgcccagatgatcgtgtcgggatctgcgcgctcgcccgcgagatagacctgctccagacaggaaagatcgtatttcccaacaaactcgcctttgggatcttcgcgtttgacggcgcggaatgcggtgggcgcggtgaagaagcttttgaccttatgttccgagatcacccgccagaaggtgcccgcatcaggcgtgcccacgggcttgccctcaaagacaacggtggtgttgccatggatgagcggtccatagcagatatagctgtgtcccacgacccagcccacgtcggacgcggcccagaacacatcgcccggatcgacgttatagatgttcttcatagaccaattgagcgccacaagctgcccggccgtgtggcggatcacccccttgggctgtccggtggtcccggaggtatagaggatataggagggatgattgccctcgaccggcacacagtctgcaggctcgacgccatattggaacccgtgccagttcacgtcgcgcccctcgacaagctccgcaacttcctgctcgcgctggaggatcacgcagaagtccggcttgtggctggccatgtcgatggctccatccagaagcggcttgtaatggacgatacgtcccggctcgatcccgcaggaggcggcgatgatcgccttgggggtggcgtcgtcaatccgcaccgcaagctccgaggaggcaaagccgccaaagaccaccgaatgcaccgcgccgatccgcgcacaggcgagcatggcttccagcgcttcggggatcatcggcatgtagatgatgacgcgatcgcctttttcgacccccttggcgcgcaacgcaccggcgagggtggccacgcggttgcgcagctcgacaaaggaaatctcgcgttttgtgtgggtgacggggctgtcgtagatgatcgcggtctgctcgccgcgcccggcctcaacatgacggtccaccgcgttgtagcaggtgttgaccttgctgtcggcaaaccactcatagagcccaccgcccagatcgctcagcgcctttgacggggctttgtcccagctgatggcgccggccgcctccatccagaacccctctggatcggctttccactgcgcatatacctcagaataggtcatcggggtcctcctccctgtctgttctgaggacagagcctaggcgcaagagcaaagctctcgcaagcgcggcgacggctgctgcgacgaattagaacctgttagcgatagattttgccaagtggagttgcaaagttttgcaaaccctggaattgggcgaattttgcaggggaaatctgtcaggtctgcaaagttgcaaagctaatcttgtggtaaatccagcagggcggcgccgactcaccttaggtcaaggtcaaggtcgaggccacggcgcgccgcgcgtggagggcgaagggcagggctgcccctcgcagagatcattttgcgctgcgctgggcgtcagccgtaatgggcgaccggagtgcccgcgatggcggccatgttcaacaatccgcgtgcggtgatcgacggggaaacaatatgagcgcggttgcccatgcccatcaggatcggcccgacctcaagcccgccagagcgcatcttgaggatgttgcgcacaccagacgccgcatccgcatgggcaaagaccagcacattggcagcaccttctagccgcgaattggggaagatccgctcacgcagctccgggtcgagcgcggtgtcgatgttcatttcgccctcgtagacaaaatcgcgccgcttgtcgtcgaggatcgccaaagctgcgcgcagacgctccccggtgtcgcattggatgttgccgaactggctctgcgaacagagcgcaatctgcggcttcagaccaaatcggcgcacatggcgcgctgcaccgatcacggtttcggcgatttcttctggagtcggttcaatgcggacctgggtgtcggcaatgaacatcggcccatcgtcgaggatcatcatcgagagcgccccatgtggcgcataagaaccgccgcccaggatctgctgcacatagttgaggtgccagcggtactctccgaacgtgccgcagatcaggctgtccgcctctccgcgatgcaccatgatggcgccaatcgcggtggtgttggtgcgcaggatcgctttggcgagatccggcgtcaccccccggcgctccatgatccgatgatagctggtccaatagtcacggtagcgcggatcgttttcagggttcacaatttgaacgtcctgaccgggacggatcgacagtcccagacgctggcagcggtgctcgatcacctccggtcgaccaatcaggatcggagtctctgtggtctcgcgcagcatctcctgtgcggtgcgcaagacgcgctcgtcttcgccttcagcaaagacgatccggcgggctgccgcgcgagcggcctcgaacacaggtttcatcaggagcgcggatttgaacacgctttggttcagcttggcgcggtaagcccccagatcgtcgatcggccgcttggccacgccgctggacatggccgcgcgcgcaacggcagaggaaaccaccgccaccagacgcgggtcaaaaggctttgggatcaggtaatccgcgccaaaggtgagctgctcccccttgtaggccgcagccgcctcggctgaggttgtggtccgcgcaagctctgcgatcccctcgacacaggcaatctgcatctcgtcgttgatctcagtggcgccaacgtccagcgcgccacggaagataaacggaaagcacagtacgttgttgacctgattgggaaaatcgctgcgacccgtggcgatgatagcgtctggcgccaccttgcgcgcctcatcgggcatgatctccggggtcgggttcgccagcgcaaagatgatcgggcgtttcgccatcttcgtgaccatctcgggcttgagcacattgggaccggaaaggccaaggaacagatccgcgccgtcgatcacctcatccagcgtccgtttctcagaagcctgagcaaaggccgccttgtgcgggttcatgtcctcctcgcggccttcatagaccaagccgtgaatatcgcagagccagacgttctctcgcttgaccccaagtttcagcagcatgttgaggcaggcaatgcccgctgccccgccgccggtcgagacgatcttgatgtcctcgaacttcttgcccgctacatggagcgcgttcttggccgcggcgccgacaacgatcgcggtgccatgctggtcatcgtgaaacacggggatgttcatccgctcgcgacagagtttttcgacgataaaacaatcaggtgccttgatgtcttcaaggtttaccgcgccaaaggtcggctccagcgcgcagacgatgtcggccagtttctcaggatcgctctcgttcaattcaatgtcaaagcagtcgatattggcgaagttcttgaatagaaccgccttgccttccatcaccggtttggaggccagcgcaccgatgttgccaagtcccagaaccgcagagccgttggagaccaccgcaaccagattgccccgcgccgtgtagcgcgcggcattggcctcgtcgtccttgatctcaagacaggcttcagccacgccgggtgagtaggcccgtgcaaggtcgttgccagtggccagcggttttgtggcgcgaatttccagtttaccgggacgcgggaactcgtggtagcgcagagccgcgtcgcgcagggattccgaggtcttgtcgggcatgaaggtcgctcctgatggtgatagtttagtgctaaactatcttgcgggtgaggggaaccgccttttgcacaaggcgcagatcatcggcaaggctttgcatctcgcatcactgagtggcgggcggctcgccaaaattcctgccggggtgcgggacggcatgctctgttcagcctgccagaaggctttggtcttgttgattgagggagggtgccgcgagatgacatttgaccatccgatcaaaacgggcaaagactgggacaacaggaccacacgaatgccacaaggcccgaggccccacgcgctggcgcaggatcgtcagccacggccccctgcgaggacggagatcattatgcctgcatcagacaccgatactattcatccattgcgcgcagccgctgctacggtgcgccagaatgcccatgcgccctattcgaacttcaaggtgggcgcggcgatccgggccaaatccggcacggtctatgtgggctgcaatgtcgaaaacgtggcctatcccgaaggcacctgtgccgaggccggtgcgattgcggcgatggtggcggccggtgaaactgaacttcttgaggcctatgtgatcgccgattgcccaagcccggtgccgccctgcggcggctgccgtcagaagctcaaggaattcggcgctgccgaggtcgcggtgacccttgcaaccaccgatggcgtcgaaatgcagaccacgattggtgatctgctgcctggcgcgtttgacgcaggccatatggagcggagctgagggcatggatgcgcgcgcggtcattgcccggttaaggcagaaacacaccccaagcaccgaggagctgcgctggtttgccgaggggcttgccagtggcgccgtcagcgacgcgcaggcgggcgcctttgctatggcgatctgtctcaacgggttgccagccgcggcgcgctctgacctgacacttgcgatgcgcgacagcggcgatgttctgacgtgggatctgccggggccggtggtggacaaacactcgaccggtggggtcggcgattgcgtgtcgcttcttctggcgcctgcgcttgcggaatgtggcgcttatgtcccgatgatctcgggacgcggtcttgggcacaccggtggcacgctcgacaagctggaggcgatccccggtctaagcaccgaggtcacgcaagatcggctggcgggaattgtggccgacgttggctgcgccatcgtgggggcaaccgcgcggattgccccggcggacaagcggctttatgcggtgcgcgatgtgacggccacggtggagagcctcgatctgattacagcatcgatcctttcgaaaaagctggctgccagccccgaggcattggtgctggatgtcaaaatcggctcgggcgcctttatgaaaactgtggaggaggcgcgcgctttggcgacctctctggtggaaacctcaaaggcggcggggtgtccgacgcaggcgctgatcaccgacatgaaccagccgcttgttccagccttgggcaatgcgcttgaggttgccgaagtggtgcgggcgctcaccggtcagtcgagcgggcagatcatcgagatcaccgtggcacttggtggcgcgctgttgcagcaggcgggacttgcccccaaccaagaggcgggcgagacgcaaattgccgccgcaatcgccgaaggtcgcgcggcagagcggtttgcccgaatgattgccgcgcagggtggtccgtccacagagcttgagacatgggcgcgcgcgctgccgcaagcaccggtctgcgcagaggtcacggccgaggacgcaggctatgttgcggcgatcgacggcgaggcccttggtctgctggtggttcggctgggcggcgggcgtatggttgaaagcgaccgtatcgaccctgcggtcgggatctcggacctgctgcacttgggggccaaagtggccaggggcgatgtcattgcgcgcgttcatgccgcccacgcagaggccgcgcaagatgcgatctcggccttgcgggcggcggtgaggcttgcacctgccgcacccgacctgccgccgctgttgcatgagaggatcagctgatggcgcgtgcctttctggttgtattggactcggttggtatcggcggcgcgccggatgccggggcctattacaacaaggatctgcccgatctcggggccaataccgtcgcgcatattgcacaggcttgtgcggagaagcgcgccgaggaggggcgccggggcgggctgcatttgccaacgcttgatgcgatgggtctgggcgcggcagtgcgccttgcctccggccagcctgcgccgggtcttgatgctgtgccagccgggctttggggcgctgcggtcgaggtgagcgcgggcaaggacactccctcaggccactgggaacttgccggcctgccagtgccatgggactggggctatttccccgaggagggggcagcctttgatgcggatctggtggcgcatgtggcacaggccgccggggtctcgggaatcttggggaactgtcatgcttctggcaccagcatcatcgcggagcttggcgcagaacacctgcggacggggctgccgatctgctacacgtcggccgatagcgtctttcagatcgctgcacatgaggagcattttggccttgagcgcttgctcaagctttgcgccgatatcgcgccctatctgcatgcccgcagggtgggccgcgtgatcgcgcgtccattcgtgggctcccctgatgcagggtttgagcgcaccaccaatcggcgcgactatgccattaaacctccggccccgatcctgaccgattgggttcaggctgccggtggacgtgtccatgccatcggcaagattggtgacatcttctccatgcaaggcattgatacacttgagaaaggctctgatcaggctctgatgcgccatcttgccaatgcggtgcaaagcgctgaagacggcagcctgacctttgcaaattttgtcgagtttgacagcctttatggtcaccgccgagatgtcgcgggctatgcgcgggcgctcgagtggttcgatcgcgagattaccggaatcctcgcgcagttgcgtccgggggacctgatggtgctgaccgcagaccacggcaacgatccaagctggcccgggaccgaccatacccgcgaacaggtgccggtgcttgttgcaggggcggggtcggggtgcatcggaaccgtggggtttgtcgacatcgccgcgtcggttgcagcgcatctgggggtaccctccgaggggccggggcgcagctttttgccctgaacgcgccaaggcgcgaccggaaaacgccttgcttgtccgggggcggggcgcttatgaaaacaaaaaacaaaaggagtgcgcctgatgagtgaccacctgaccgtcgttgaccacccgctcgtacaacacaagctgaccatcatgcgggacaaggccacgtccacctatgaatttcgccagctgttgcgcgagctgacgcagctgttggcctatgaggtcacccgcgagttgccgctcacgacgaccaccatcgaaacccctatggaggaaatggaagcgccgatcctcgcgggcaagaagctggcacttgtgtcgatcctgcgcgcaggcaacggcatgctcgatggggtgctcgagctggtgccctcggcgcgggtgggctttgtcggcatgtaccgcgacgaggaaacgctggagccggtgcagtattatttcaaagttccgcagcagatctctgaccggatggtgattgcggtggacccgatgctggcgacgggaaattcctcggtcgctgcggttgacctgctgaaaaaagcaggcgccaacaacattcggttcttgtgcctgctggcctcgcccgaaggggtggcacgcatgaaagaagcgcatccggatgtgaagatcatcaccgcctcgctggatcgcggcctcaatgaaaagggctacatcatgcccgggctcggggatgcgggcgaccgtatgttcggcaccaaatagcccagagatggccccatgcaccagctgccacgcgcgacactctgcgcgcaacagctgaggtttggggccacccccgcaatatggcgacgatcagacggatcgcgccatattgttgcccagattgcctttactcagttggggatttgaggcatcctgccgccatatattgtggggcagttggatgaaaataactacaattacggcagtatccctcatcttggcatccggcttggcaactggtgtcagcgcgcagctgtcctccaagacggcgcaaccagcagagtttccaccggcgagttatcagggtcgtcaatatgtggacagccgtggctgcatctttattcgcgccggtgtggacggcaatgtgacgtggattccgcgtgtgaaccgcgcccgtcagcagctttgtggtgcggaaccgtccaacatcgcaggctcaacgcgccagcagccccaaacgcaagacccgcgtcccgatatcatcactctgacgccggatgaggatcgtgtcgacgaggccgccccggtgcggctgaccacgccgacaccggcgcgcacgcgctcgatcgtgccgcctcctgcggtcaaaccagagcgcagagccgaagtcccgacaccggatgcgcgcgcgacctcgcttgcgcctgcacggcccattcgcgctgccgcgcctcagcccgttgctgcggcacctgcgccggcagcgcctgtcgttgcacccgcaccgcgccgcccactgcgcaatgcgggcgatccgttggatcagatcacgcccaacacgcgtatcctgccggtgcacgtctatctgatgcgccgacagagcgaggggcttcaggtgcccgagggttaccgcccggcctgggatgatgatcgattgaatatccgtcgggtcgagcaaaccatccggccgaccgtgatcaaccaactcccggcagtgccggaggggtacgagttggcagatcgtgcggacaatcggatgaacatccaacgcgggcagcgttctccccaaggggatgcgcagatggcgcaggtctggtccgacacgctgccacggcgtttgctggagcagccgcttgataaaacacccttcgtcctgagggatgccaaggccagatatgggtatcttgagccgcgccagggcacaggtgtagccacccgtttgtcgagccgggcagccccggatgcgaccctgccagaggcggttccgtctaagccacgctatgttcgtgccgtgacccttgcctccgaggaggaggcccgccgcattgcgcgtgagctgtcggcggcgaccgggttgcagatgcgtcttggcacgctcacccgtaacggccagaccctcaaggtggtgctcgcggggccctttacggcgggcgcggatcgggcgctgcagcgtatccgttccgcagggttcagcggagcgcggctcagcaagtagagcaatgcggcaaaacgcaaagtataggccgggcatgctcccggcctttttgtttgtaaacagtgttttagccgcagatgttttgaagttggacccagtcgcggtcattcagaaccggtgccagttcccggcccgccatggggtccgcctcgatcagcccgatggtggattcaccggtcacgtcccgcgcataggcatagggcgtggaggggatcgcggcacgggcaaattcagccaggagtgcctcggtatcgacgcccgggcgcggggaggacagcatggtctcggagtagcgatccagcgtgtcgcgtttgatttcccccgtggtgagcaggcggaaggtggcggtgaccccgccaatgtcgaggatctccgccatcggatcgcgctcgtcggcgcgcacatgttccaccaacaccgcacctgcggcgacggcggggtcctcgaaatcctcgacaaagcttcggttgatcaggacgatgccgccgggcagcgtgaggctctcggcaataccggagcgcagcacaaccacacgccgcacgtcggtgcgatccgccagctttttcaggatcggttcagcctctggtgtcgaacacgcctgacctgagacccgttcgatacgtcccagaagcgcctgacctatggccttgcggtggacgtcggagacagcggcaagggtctgatttcgcatggttttcggcagcccaagcgccaagagtgcgaccgcgcagaccacaattgtcacgcccccaaagagccgaaggcgcccggggtgtggacgcgcgcgatcaatggcggtttgcactttctcgatcgcgtcacgcatggtgacctcatcttcagcaagctccaacgtctcgccggggtcgccatcgggatgataaagcgccgggaaagcgccgggattggcgcgctcgatcgcggccagcgaccaatgggcgagggggcgatcttgcatatcggtgatggtgagcgtggcatctccaagcgagacgatcacatcccgccgctgctctgccggggacgcccgccagatccccactgcctcaagccgctgaaattcgcgcagtaccgtcatggaccggaaatgcctgctcctgttgttgttcgttgcatttaacatgcaagccgcgtcggcggcaaaccgctttgcagctcgagcggtggtgcttgggtgtttttgcgaacgttgagagggcgttgaggtggaaaggggccagatatggctgcgcaagacaccccctcggtcagtgggcgagcatagcaggaggtgcttgctcttgcgcctgcgaaagcagaaggttgtgatgaagtgtcatacgctgacgcgaagagtgcggtatcagtgctggaggatattgagagtatttgcttgaaagcactcatttgtgatgcgcgtcacgcaggaacggcctgtgcctgaagctacctccattgcacacaaagacaatgtctgggtcaaattggttcactgcgcggaaagggtatacattgttcaaacgattgttcggcaaacgacaatttcagtacaagtgcaacgcgtgtggtgagcttcaccaaggatcgccgtcgttctcgtttcggtttccgacatactatttcgatgtccccgagggggaccgaaaagatcggactttcgcctcggatgatctttgtcatattaaacctgcaaaaggtgatgaccaaggcgacgagattttctgtattcgtgttgtccttgagatcccgatccaaggtaccgatgccgtggttacttggggagtttgggttactcagtctaaagatagcttcgaaaaatacgtcgaaacctttggtcaggatcagtcgtcgctcgggagctttgggtggttgcccgtctacatgccgttttacaatctatctgatgctggcgctcctcttgagcaccttgaatgtgatattcaatggagtgccaaggggcaaagaccaaaggcctatctttgggacagttcccatccgctttccattgatcaacgcgaagggatcagctggagaaaggcaataaaaatagccaatctcgcaaatcacgcgtgctcaaggaaagatcaggtcgcttaacagaggaagaccgacattcgcgtcgtcgctgcgaactggtgcttcgtcccgcgtggtatccatctatgaatggggtggtgaatgtcagcaattgcagattcacgcccagtctgacagatcttcgccatccagtctcatttcaccaaagcgtcttcatccacggctcgaggtcgccctcaactcccccctgcgaagctcttcctcagttcaaacttctggatctttccggtcgaggtcttggggagctcgcagaagaccactgccttgggtgtcttaaagcccgcaagcgtttggcgggcaaaggcaattagggatgcctcatcgacatctgcgccttctttgagttccacaaaggcgcagggcacttcgccccatttctcgtccggttttgccacgaccgccgcaaggttcacatccggatggcccatcaggaccccctcgacttcaacggaagagatgttctccccgcccgagataatgatgtccttggcgcggtccgcgatctggatgtagccatccgggtgctgaatcgcgatgtcgccagagtggaaatagccgcccgcaaacgcctcttcagtggcttccgggttctttaggtaacctttcatgacggagttgccccgcatcacgatttccccctgatcgctgccattcatggggacctgttgcatgtcggcgtccatgaccgtgatgtggtccatcattggaaaggccacgccctgacgtgccttgattgcggcgcgcccttgttgatccagctcgtcccagctgtcgcctttccagaggcattccgtcacatgaccataggtctctgtaagcccgtagacttgcgtgacatgaaagcccaggcgttcgattttctcgagcgtggccggggcagggggcgcaccggcggtaaagacttcgaccgtgtggtcaaaggcgcggcgctcggtgtccttggcgttcacgatcatgttgagcacgatgggcgcgccgccaaaatgggtgacaccctcatccgcgatggcgttatagatggcttcggcggtggtgttgcgacagcaaaccacggtgccgcccaggaccggcatcatccaagtgtggttccagccgttgcaatgaaacagcggcacgatggtcaggtagaccgggcgcagttgcaaccgccacgacaccaccgtgcccatggtcatcaggtaggcgccgcggtgatggtagaccacgcctttcgggcgcccggtggtgccagaggtgtaattgagcgcgaggctctcccattcatcctcgggcatgatccagtcaaaatcagttgcaccatgcgcgatcaggtcttcataggtggtgtagcgaccgctggccgcatggccagcctctgtgtccggcacttcaatgagggtagggcctgcgccctgcagtctttctttggcggcttcggcaagaggcaagaattcactgtccacaagcacgactttggcctgaccgtgatcaaagatataggccaccgtatccacatccagccgaatgttgatcgtattgagcaccgccccgcaggctggcacgccaaaatgtgcctccgcctgtgcggggatgttgggcagcaatgttgccaccacatcgcccggagcaacccccatcccggccaatgccgacgccaaccgcgtgcagcgatcatgatactgggcatagctgcgccgagtctgaccgtagaccaaggcgggttcgtcggcaaagacatgcgccgcccgctgcaaatgggacagcggcgtcagcgcgacataatttgcagccctgcgctccaacccggtttcatcggccaaccaccccatagagtctcctcccaagctcagtgtttttatctctgggagcgattattgcgctgaggcgttcgaaattgaaagagattgcttggtgctggctgcaattcctcggatctgacctgcgatcacaggtgtttcccaaagcacagtaatgggttagcctctgcgcatgatcctttcgcgtgggcgcaactacgtctttattcatatcccgaagaccggtggcaccgcgcttgcactggcgcttgagtcgcgcgcgatggccggagacgagatgctcggcgacacgcccaaggccgtcaaacgccgccgccgcctgcatggcaccgagacgcgcgggcgattgtggaagcattcaacgcttgcagacatcgaaggtctcgccagccgcgaagaactgcgccagatgtttgcctttacccttgtgcgcaatccctttgatcgcgtggtgagcctgtatcactggctcaaagagcaatccttcgatcatccgatggtgccactggcgcattcgctgccgtttaccagctttgtgaccgatcctttggtgatgcgcgcgctcaaatctcaaccggctctgtcttatatgatgcagtcggacgggtatgagcattgcagcctttacataaggctcgaatatttcgctaaggatgccgcacctttgttcgatcacttgggattcgcattggaattgcctcgcgtgaatgagtcgcgtcgcgatccggactggcgtgtttactatgattcacaggcggttgatgccgtaaggacgtgctgccagctcgaaatcgaacgatttgaatactcttttaacgattaccccctatccctttgatacagagcggctccctaagagcacgcgcccaggcccgaccgatttgctacaaaggcttcacggaacggcgattggagcttcgagcccctgaggtccggagcaacatcaaggtcgaaaggacaggaacatgctggattggtttgcaaaacgaaatgcctccccgatggcagaggcgttcacaaccgaatttccgatggtcgcaactggccaggcagggtttctctcagggaccatggtcgcgaccgcaaccggctggcgccccgtcgaagcgctctccatcggtgacgaggttctgaccttcgatcacggcatgcgtccgatcaaatccattacccgtcgcaccctggttctgggcgacaccgcctgcgcccaggaaatggcgccgatctatatcccccgtgatgcactgggcaaccgcaacccgatgtgggtcaagccagagcagggcatcctcctcgagcatgatcttcttgaagacagccttggtgatcccttcgccgttgttccggcttgcgcacttgaaggctaccgcggtattgcccgcgccccgcagcaggtgaccatgcagaccgtggtgcttacctttgacgaggacgaagtgctctatatcgaagcgggcgtgctggcctattgcccggcagatcacgacctgatgcactactgcgtgaccgccgcctccgaagagctctacacaatcctctccgccgccgaggcgcgtgagctggtcatcgacatgatcaccgaagacagcttctggacccaaggggcggttgctggcagcggtggcacaggtgagccgcagtatacgaccttcgcctgatccccaaacgctctctctcacacctcctgagcaaacaccccgcgcgccgcttggtcggctgcggggtgttttcatgttggagcacgcgcttgttttcgggaagctccgcgtcgaacgtcgcccctgcgctggccagcacaccacgatctgccgcgatgggcgtacgggagcgcgctgacgccccaacaggcccattccgagatcgaaaactactcccggtccagctttcatcttttctcaaatatctctgagcgcgaggcagagcctcgcaaaaaaaatagccgccccaaagacaggggcggccatatcagcatgaaggcaggacggtttaggcggcttgatcctcttccggcgcaaaccggccatagaaggtctggcctttttcggccatctcccgcaggagcggcgggcaggcaaaacggtcgccgtatgcctcggccagttggtcacaacgctcggctgcatagggcgtgccgatgatgtcaagccagctgagcggtccaccggaccacggcgcaaagccccaggcgagaaccgcgcccacgtcaccctcgcggatgtccatcagcacgttttcctccagtgcccgcacagcctcaaggacctgcgcaaacatcagccgctcctggacctcaaccagatcgggctgaacctccgccagcgggtatttctccgcaagccccttccagtactcaacgcgcttgcccttgtcgtcatagtcaaagaagcccgcattggccttgcgccccagacgcccctgatcttccatccagaagatcagatcgtccgccgggctttcgggataggcgtcgcccatcgccgccttggtggcgcgtgcgatctttgcaccgagatcgatcgaggtctcatccgtcagctggatcggccccaccgggaagccaagctggcgcgcggcgttgtcgatcagcaccggcgagacaccttcggtgatcatccttgcgccctcgttgatgtaggggatgatgcagcggttgcagtagaagaagcgcgcatcattgaccacgatcggcgtcttgcggatctggcgtacatagtccagcgccttggccaccgcgcgatcgccggttttctcacccttgatgatctccaccaggaacatcttctcaaccggagagaagaagtgaatgccgatgaactgctcgggccggaccgaggcctcggccaggctggtgatcggcagggtcgaggtgttggaggcaaagatgcaatcctcggggatgatcgcctcgaccttcttggtcatctcggccttgacgcccgggtcttcaaacaccgcctcaatgatgagatcgcagcctttgagggcgtcgagatctgctgttgcggtgatctgcgccagcagcgcctcttttttctccggcgtggctttgccgcgcttgatgcccttgtccatataggtggcagagtaggccttgcctttgtcggcggcgtcctgatcgcggtcgatcagtacgacctccatgcccgcctgcgctgaaaccagtgcaatgcctgcgcccatcatgcctgcgccgagcacgccgatcttcttcacggactgatcctcaatgcccttgggccgcacggcgcctttctccagcgcttgcttgttgaggaacagcgagcggatcatcgcagaggacgacgggttcatcagaacatgggtgaaccagcgcgcctcgatgcgcagcgcggtgtcaaaatccaccaatgcgccctcatagaccgccgagagcagcgccttggccgccgggaaggcgccttgggtcttgccatgcaccatggcagacgcgccgacaaagttcatgaaccccgccgggtgatagggcgcaccaccgggcattttgtagcccttctgatcccagggcttcacgatatcggcgtctttggcgttgagcacccactgacgcgccgcttccagcggatcggcggcaacctcatccacaaggctcgcggatttcgccttcttggggtccatcatcttgccttcaagcagcacgggggcggcgttcacggcacccaccatgcgcgaatagcggatggtaccgccgccaccggggaagatgcccagcaggatctccggcaggccgatcttggcctttgggttgtcggtcatggttcggtaatgacaggccagcgcgatctcggtgccgatgcctgcacaggtgccattgatggcgcaggcaatcggcttgccgcccttgttgttcttggcgtccatccctgcgcgctccagcttgcgcaggatgcggtggccattcatcgtaaaatcaaacaggccctgagccgggttttcaccggattcctcgcggatggtggccaacacattcaggtccatgccgcccgcaaagtctttcttgccggaagtgatcaccacgcctttgacggcgtcatcgccaagcgcacggtcgatatagtcctccaccaggccaaaggcctcgcgggtgaggacgttcatgctcttgccttccgcgtcccatgtgatgatggcgatgccatcggcgtctacgtcgtatttgaaatcggtcatagtctttgtctccaaccctatcaggtgagaaggcgtcgcttagacgcgctcgatgatggtggccgcacccatgccggatgcaatgcagagcgtggcaaggccgcattccttgtcctgccgctccagctcgtccagcagcgtgccgatgatgatcgcaccggttgcccccaaagggtgccccatggcgatggagccgccgttcacgtttaccagggccggatcgacgtcaaaggcttgctggaagcgcaacaccacggaggcaaaggcctcgttgacctcaaatagatccagatcggatattgtcatgccggtgtctttgaggatcttctcggtcacaggcacaggaccggtcagcatgatggtcgggtcggtgccgatcttggcggttgccttgatacgggcgcgcggcttcagaccatggcgttcgccaaattccttgttgccgatcaacagcgcggcagagccatccacgatccctgaggagttcccggcgtggtggatgtggttgaccttttccagatgcgggtacttcagttttgccacggcatcaaagccaggcattacttcgcccatcatctgaaacgatgcattgagcgatccaagcgcctgcatatcggtgccggggcgcatgtattcgtcatgatcaaggatcgccaaaccgttctggtcgcgtacggtgatgatcgacttggcaaagcgattgtcatcccacgcggccttggcacggcgctgggattccaccgccagtgcgtcggcctgatcgcgggtaaacccatactcggttgcgatgatatcggccgagatcccctgcggcacaaaatacgtgtccatcgcaaggctcgggtccacggcaatcgccgccccgtccgatcccattgccacacggcccatcatctcgacgccgcccgcgatatagccatcgcctgcgccacctttgacttggtttgcagcgaggttcacggcttccatgccagaggcgcagaagcggttgatcgcaagacccgggatggattgatccagatcggaggccagcacggcagagcgcgccagacagccaccctgttccatcacctgcgtgacattgccccagatcacatcctcgaccgcatggccttccaggttgttgcgttctttcagcgcgttcagggtcagggcagagaggcgcacagaggtcacctcgtggagggcgccgtccttgcggcccttgccgcgcggggtgcgaacggcatcatagatataagcttcggtcatattggtctcctcaagctcgatccgacgggttgccgggcatcaggtcataggggtgtttccagccgggcagggcgctgaggcgcgacagccaggcgtcgatgttggggtaatccttgcggtcaaagccgaaaggttcagggtaatagagatagccgcagcaggtgagatcggcgttggtgaggctttcgcccacgatccagtcgcggccctcaagatgcttgtccaaaaccgcataagcggccttcaggcgcccttgcagaaaggcgatcacctcggcgggccgtttatcttcgggcatgaaattcatcaagaaccggcacagacccgcgttggaggacagtttgtgattgtcccaaagctgccagcgcaggatttcgcgcttttcttcgggcgtagatcccccaaacttgccgtaagtatcagatagatactgctggatcacgccagattgcgtaagggttgtctcgccatcaacgagaaccgggcattcgcccatttcgttgacgccctcgcgaaactccgctccgcgtgtgataccgttgaaaaagtcgacaaagacaggctcccaatcaagtcccgcaagctcgagcgcgagtgcgactttgtaggaatggcccgactcgccaaaacaatagagtttcatatcaaatcgcccctcccagtggcgatgtcgcggcgggggtttcacacccccgcacccccgtgggatattttgaagaagatgaaggatagtcagcgtttgttaaccaagatggcgataacatggcagtacggtacaggctgggaagccgatgaccgcagaagctgaaggcgcgcttgcccattaggcggagagctcgggggcaggcgcgccccatcccttcaacttctctgaaatatccccgccggaggcatccgtcagacgcggcaagggaaagcgctggaactgtcatagagacctcgcaatcagctctttcataatctcattggtgccgccgtaaatgcgctgcacacgggcatcggtccacatttctgccacggcgtattcttgcatgaacccatatcctccgtgcaattgcaggcactcatcaagcacagcgccttgcgcgtcggtgatccagtatttagccatcgccgccttttcgacggtcaactctccacgtaggtgctggaccatgcagtcatcaaggaaggcgcgggcgactttactcttggtcaggcattcggcgagtttgaaacgggtattctggaactgcgtgagcggcccgccaaaggcttcgcgctctttacaatatgcgatggtgcgctcgaccgcgccctgcatcgcgccaaccgcgccgcaggcgatgatcagccgttcctgcggcaattgctgcatcatctggtaaaagccttgcgcctccgttgcgcccagaatgttctccggtggcacagcgatattgtcgaaaaagagctccgaggtatccgccgcgtgcaggccgaccttctcgaggttacgcccccggctgaacccttcagcgccctcggtttcaagcgccacaagcgagatgccttttgcgccctgggacgggtcggtcttggccgcaacaaggatcaggttggcgtgttgcccattggtaataaaggttttctggcccgagagccgataaacattgccatcacgaatggccttggttttgatcgcctgcacgtcagatccggtacacggctctgtcatcgccagcgcgccgaccaactcgccggacaccatcttgggcagccagcgctgtttttgctcttcggtaccgtaggagaggatgtaatgcgccacgatgcccgagtggatcccgtggccccagctggcgagattggcgcggctggcctcaatcaggatcgccgcctcatggccaaaatcgccgcccgcaccgccgtattcctcggggatggaggggcagagcaggcccagttctccggcctgcgcccatgtcgagcgatccatctcgccctgtttgcgccagcgctcgaatttgggcgcccattcgttggtgataaagctctgcgtcatatcggcgagcatcttatgctcgtcggtcatccacaccgatgatgtgcgaaaatccagctctgcgctcatctctctcccccttgggcgcgtggcggtgcgtgccctgcgctagcgttttcgatcctccaattcggcattgaacagccgcaaccggtgggtcaggttctcgtggttggtcacgctgtcgaaattctcgaacagaaaggacaacgcttctccctcgtccagtccggcctcttgggcaaaacgtttgagcctgcgaaacccatcctccgtcatcgcgacgggaaagcggcgggtcaggcgaaagcgtttgggcatattcggatcctctcaattccaaatgcgccccggcggccaagggtggatgcgccccaaacgggacacatcccatgtcgtgtcgctcagcgcgatcagaactgtgcggcgtcgagcgccatcaccgtgtcggcaccggtctcaatgcgggccaggtgcagttttgtcgcgggcaactgacgtgccatatagtagcggccggtggcgagtttcgtctcgtagaacgccgcgtccgacgccccttcgtcaagcgccttttgcgcggctttgcccatcatcgcccacatgaggccaaggcagacatgaccgaacatgtgcatgaaatcggtggagcctgcgagcgcattgttggggttcttcatgccgttttgcatgaaatacatcccggccgcctgcagatccttggaggccgctttcagaggctcaatgaagtccttggcataagcgtcagagatctcggcgttttccttgcagaaccctttgaccatgtcaaagaaggccatcacgtgcttgccgccgtcctgcgccagcttgcgccccaccagatccagcgcctgcacgccgtttgcgccctcgtagatcattgcgatacgggcgtcgcgggtatattgcgacatgccccattcctcgatgtagccatggccgccgtaaacctgctgggcctgcacggtcatgtcatagcccttgtcggtcaggaaccctttgataaccggcgtgagcagagagatcagcccatcggcgtccttgtccccagaacgatgtgccttgtcgatcatggtcgcgccccagaggataaaggcccgcgcgccctcggcaaagctcttttgatccatgaggttacgacgaatgtccgggtggacgatcagcggatctgccgggccatcggggttcttcgcgccggtcacgtcacggccctgaaggcggtccttggcgtattccaccgcgttttgataggcggcctcggcctgcgccagaccctgcatgcccacgcccagacgcgcttcgttcatcatggtgaacatggcgcgcatgcccttgtgcatgtccccgaggagccaacctttggcgccatcatagttcatcacgcaggtagagttgccgtggatgcccattttctcttcgatcttgccgaccgaaacgccgttgcgctcgccgggggtgccgtcctcattcacgatgaacttcggcacgataaagagcgacacgcccttgataccatcggggccgccggggatcttggccagcaccagatggatcacgttttcggacatgtcgtgatcgccagcagagataaagattttttgcccggtgacgagataggacccatcgtcttgcggttcggccttggtgcgcatgaggcccagatcggtgccgcaatggggctccgtcaggttcatggtgccggtccactcgcaagagaccatcttgggcagataggtatctttctgtgcgtcggtgccatgcgccagaatggccgaagccgcgccatgggtcaggccctgatacatggtaaacgcctggttcgcgccagagaaaaactcgcccacggcggtgccgatcacatagggcatgttctggccgccgtattgttccggcatgtcgagaccgggccagccgccttctttgacttgttcaaacgcggccttgaaaccggtcggggtgtagacaacgccattttccagacggcagccctcggtgtcgcccaccacattcagcgggtgcagcacgtcacgggcaatcttgccggcttcttccagaacggcgccggtgaaatcgggctccagctcgtcatagccggggattcctgcgtccttgatgttcagaacatcgtgcaggacgaattgggtgtccttggtgggtgcggtatagctcggcatcgcggtcctcaaaggttggatgtggtgcgtttagcggttcaatcagtcgggcagggcggcgaggttactcggccgccttggcgcttgttttcatggaggcgatgactttttcgccccacttcagctgatccttcaggtcatcaatggcctcggtcagctcgtcgcgctggcgctccatgtcggccaggcgttcctgtgcgatctcataggtgcggctcagctgcgtcagctgctgatcgcccatgtgatagagatcgagaagctggcggatttcctccaggctgaagccaaagcgcttgccgcgcaggatcagcttgaggcgggcgcggtcgcgtttggtaaagagccgcttttgtccgtcccggatcgggaacaacaattccttggcttcgtaaaatcgcaacgtgcgcggagttaccccgaactcgtcgcacatctcgcgaatggatttggtgtcttcactcatagggcgtcactcagatgttgctttacgttggcgcttctgacgtcaaccttggcggctcatggaggaagttacaacatgaacttgacgtttacgtaactccgacgccgcgtcactttgaggggtgacgtggtggcagggcgatttgacgtgacgttttgaggaaaagccaaaaattctagaggttaaatcagcgtcatgtatccgcaatgcatgcgcaaacaggctgatttaagtttgccaataggcccctatgacaggcatctgtcgatgagatacagccgcagcgcgagagggggcagtaacgtaagcaccagaagcgcccattgcagtttgttgctcgatatcttgcgacgaccgaccaagaccgcgcacatttgtgcgacagtgaggtcctccttgagctttacgaaaatacccgagatcagacccccagaccagaaaagcagctgcgggtagaaagaggtctcgccgatacagtcgtgtatgtccattgttgtgccttgcgcagctactctcggtgggtgcaacgggcgagtgacctacttcaataaaccgagcgtcaccttgcgcagatcagtgagttcgtccatcgcctcgttgatctgctggcgctggagttccagctccttgagttgccggtcggccatctcgataaaggcgcggttttgcgcttcgtcgccttccttgtcgtagatcagcaaccattgccggatctcttcgagctgaaagccgaacttgcgcccgcgcaggatcagcttcatccgcgccacgtcgcgcgcgccgtagaaccgcgagcggccctgacgttcgggctgcaacagctcgatatattcatagtaccgaagggtgcgcggtgtcacatcgaactcggcgcacatctccttgaatgacagttttgtttcggtcatccatgtcctcccttgctcgggcaacctaagcaactgaaccaaccggtgcaactgggagtttcgcgagccttgcgctttgcccccatgcgcggaataaatgaggcatattcggtcaggagcaagtgatggcagaaaaaacgcagctggcgcgccagtttatcgaggcgatcccgcattccaaggcgcttggtatggagctgaccgaaatcggagatgggcgcgcggtgatcgtgatgccctatgacaagaaactcgttggggaccccgagacaggtgtgatccacggaggcgctgtgtcggcgctgatggacacctgctgcggcgcggccgtgatgagccacccgagccagccgtcgagcaccgcgaccattgatttgcgcattgactacatgcgcggtgcaacgccgggacagaccatcaccaccaccgccacctgtcatcacgtgacgcgcaacgtggccttcgtgcgcgcagttgcaaccgatgacgaaacagaagtgcccgttgcaaccgcctccggggccttcacgctggagccaaaacgatgagccgcccccgtcccgaacccgtgcaggtgatcaagcaacgccgtgatgctgccttggcggcgctggtggaatcggtgccctacattggctttctcggcatcacctttgagcgccgcggcgatgagctgacgtcgactatgcattttcatgaaaatatcatcggcaacccgatgctgcctgcgatccacggcggtgcgacggcggcctttctggaggtgacctccgttatcaccctgcagtggttccatctgtggccccaatttgaaagtggagagctggacgtggagacaatggccgcaggccagatgccgcgtctgcccaagaccattgattttaccgtcgactatctgcgctcgggcctgccgcgcgactcttatgcgcgtgcaacggtcaatcgctctggacggcggtatgcctctgtgcatgtggccgcatggcaggaccataaggaaaagctctttgcacaagcgacgggtcatttcctgatgccgcaggaacgcccctcaggcaactgatttcaaaaggaataccctatgtcggaggcgtcaggccccatcacccattcccgggtgctcaagatcgcgttgccgattgttttgtccaatgccaccgtgccgatcctcggcgccgtcgacaccggcgtggtgggacaacttggcgaagcggccccgatcggagcggtgggcgttggcacggtcattctgtcgacgatctactgggtctttggctttttgcggatgggcaccaccgggctggcctcgcaggcgcgtggcgccggcgatctggctgagacgggcgcgctgctgatgcgggggctgctcttggcctttggggcgggtgcgtttttcattgttgctcaggcgcttgtgttctggggcgcatttacgattgcccctgccagcgccgaggtcgaggaactggcgcggcgctatctcgagatccgaatctggggcgcgcccgcaaccatcgggctttatgcggtgacaggctggctgatcgccatcgagcgcacccgcgccgtgttcctgctgcagatctggatgaatgggctcaatatcctgctggatctgtggtttgtgctcgggctcgactggggggtcgagggcgtggccattgcgaccctgatcgcagagtgttcggggctggtgcttggactttggtattgccgctcagcctttgcgggcgatcaatggcatgactggggccggatctttgaccgtgcgcgcctcaagcggatggttcaggtcaatggcgacatcatggtgcgttcggtgctgctcacactgtcgttcaccacattcttgtttctcagcgcggatatgggcgatgtgcggctcgcctccaatcaggtgttgattcagtttctgcacatcacggcctttgcgctcgacgggtttgccttcagcgccgaggcgctggtgggtggggcggtcggggcgcgggatcgtggtcggctgcgtcgcgccgcattggtatcgagctattggggcatcggctttgccgtggcgctcggggtggggttctggctgtgggggccgtggattgttgacctgatgacaaccgcacccgacgtgcgcgagaccgcgcgcgcctacctgatctggctggcgtttgcgccacttctgagtgtcgcaagctatatgtttgacgggatctttatcggcgcgacctggacacgcgacatgaggattgccgctttgcagtcggtggctgtttacggcgttgcgcttgcaatttgcgtgccgatgtttggaaaccatggattgtggatggcgctgatggtgctcaatgtcacacgcgcgctgactctggcgctgcgctacccaagactggaggccggcatcaccgcgccctgaaaccgcgcatccggcagaagaaagccaagggatcgcagccaagtgagcaacgcgggttccgctctcatctgggctgatactttagagggggtgcgctctgctctgcaaatcgcggggggcaggccgcgcctttggcgcggcctgccgggcccaacgggaaggggcttttctcaaaagccaacctgacgggcgggagcggtccggaggcggatcgcgactactgtactctctggctcagagccagtccgcacgccctgtgccaaccgcttccgcgacatttgaaaacccgtctcgcgcgagcaatgcatcaagacccgaagcgacctcagaggccagcgacagcccgccgtagaccagcgccgtataaagctgcaccgccgaggctccagcgcggatcttggcataggcgccttcagccgtggagatgcccccgacgccgatgatcggcaccgccccatccagacgttgcgaaagctgcgccagcacccgtgtcgagcgctcaaataggggcgcgcccgagaggccgcccatctcgtcccggtgcgtgcttttcaggccgtcgcgcgaaagcgtcgtgttggtggcgatcaccgcatcaatgccgctgtcacgcgcgacctcggcaatgtcatcaagcccggatatgtcgagatccggcgcaatcttgagaaagaccgggatggggcgctgcagggcctctcgggcgtcaatgacccctgccagcagtgaagcaagagcatccttgccctgcagatcgcgcagtttctctgtgttgggcgacgacacgttcacggtggcaaaatccagatgcgcgccgcaatggctgagcacgcgggcgaaatcctgcgcgcggtcctcgctgtccttgttggccccgaggttgaggccgatcacgcccgactttggacgctgcgcgaggcgcttcccgatcgtgtccatgccctcattgttaaagccaaagcggttgatggcggcgcgatcttcgctcagacgaaaaaggcgcggcttggggttgcccggttgcgggcgcggcgtggcggcccccacttcgataaatccaaagccagcctctgaaagcggagcaagcgcttcggcgttcttgtcaaacccggctgcaagccccaccgggttcggcagcgaaagacccgccacatccgtgcgcaggcgcggtgatgtcaccggaccagggcgtggcgtcagccccgctctgagcgccttgatcgacagaccatgcgcggtttcgggatcaaggcgatgcatcagcccgagggcaagtttctcgctcagcttcatgggcagggcctcctagcggatgcggcgcaggcgtgcgcgccgcggggtggggtctgagggtcttcagaccatctcttgagggaagcgatgggtgccttcgaccagcggcagtggctttgcccagagcatctccgaaagggtcaggcggcgatagagatggggaaacaaagcgcccccgcgcgagggctcccatttgagcgcatcgcccatctggtctgcttcaaacgccagaagccaaagcccctcggcaccggcgaaatgcttggctgcggtctcggtcgcctgcgcggctgtcgagaaatggatgtagccatccgcgagatccacgggcgcgccatcggtttcaccggcggcctcaaaggcgcgccattcatcgtcacggaaaatcttgtatatcagcatggctctctcatgccctcagtccatgtcccagcgcaagagcacatctgcgtgcaaagggccaaagtttcccctgcgtcttgatcccactgtcacgtaagtttggttttgactgttcggacaaagatcatgaatattgatcccataacaaccgccagtagaggcggcataacgaaggtgagggtttatcctatgatttcacgttttctgacgtcggcagcggcgctggggcttacggctggcatggccgcggccgagtacaagctgacgatcttgcacaccaacgacatccacagccgcatcgagtcgatcagcaaatatgattccacttgcggcgccgatgacgaggccgagggcaagtgttttggcggcatcgcccgcgtcaagaccatggtcgacaccaaacgtgccgagctcgacggccagaacgtgcttctgctggacgcgggcgacccgttccagggctcgctgttttacaccacctacaagggggcagccgaagccgagttcatggaagacatcggctatgacgtaatggcggtgggcaaccacgaatttgacgacggaccggccggtctgcagcaatttgtcgacactgtgtctttcccggtgatttccggcaacctcgatctgagctccgagccgctcctgaaaggcaaggtgggcaaccatgtcgtgcttgaagtgggcggcgagaaaatcggcatcatctccgcgctggcgacagacacggtcgagacctcctcgccggggccgaatgtggtgtttcaggatgagatcgacagcctgatcgccgacgttgaggccctgcaggcagaaggcgtcaacaagatcatcgcgctgacccatgtgggtctggccaaggatatggaaatcgccgccaaagtgccgggggtggatctcgtcgtgggtggtcattcgcacacgcttttgtccaacacctctgatcgtgccgcgggcgcatatccgaccatggtgggcgatgtgccagtggtgcaggcctatgcctataccaagtacctgggcgagctcactgtgacctttgatgacgaaggcaatgtcatctccgctgcgggcgagccgatcctgcttgatgcctctgtgacgccggatgccgacatggtcgcgcgcatcaaggagatgggtgctcccatcgatgagatgaaaacccgcgtggttgccgagacaaccgatgcggtcgaaggctcgcgtgatgtctgccgcgctggcgaatgtgccatgggcaacctcgtcgcggatgccatgctggcccgcgtcaaggatcagggtgtgagcattgcgatccagaacggtggcggtctgcgcgcatcgatcgatgcgggcgaagtcaccatgggtgaagtgctgagcgtcctgccgttccagaacacgctctccacctttgaggtctccggccagacgatgattgaggccttggaaaacggcgttgggcagatcgaggacggcgcaggccgcttcccgcaggttgcagggctgaaatatgcgtttgacgcctccaaggagccgggcgcgcgcatttccgacgtgatggtcatggaaggcgagacctgggttgcgattgatccggccaaaacctacggcgttgtgtccaacaactacgtgcgcaatggcggcgacggctacaagatgttcgcaggcgacgacaagaacgcttatgactttggccccgaccttgcggatgttgttgccgaatacctcgccgaggtcggcccctacagcgcctataccgacggccgcatcaccaagaagtaacggccccgtccgctcctgagcctgttggtttgcgccgcgcaaaacaacaggtcagcgcatgcggcattaggcggcactttccgagaccccggcggttcgttccgccggggttttgcgttctgcggcggcgggtgcgggttcttgtctggaggtgagtggccgggtagtctgcacgccatggaccacccgttgatcgatcttatcaatgcgcgcatcgaggccgctgagaaagacggtgctttcgacaatctcgaaggcgccgggcgaccgttgccgccctgtgatgatcccgaaaacgcggtgatgaaccggattctcaaggacaatggcgcagtgcccgaggtggtcgcgctcagccgcgagctggcacgactgcgcgaggagttgcgcgagacgggcgaccgcagcagacggcgccaaatcattgcggatctgtcgatgaccgaagcgcggctggagctggcgcgcaaacgaggctaatcggcactggtcgcctgcacagtcgggcgcagctaggcctgttctgtctctcgtgagacgctgaactgagcgcgcgttgctttttctaacaggcggatcagttccttgcgctcggcggcagtgagcccgtccaatatgcgcggctgcagagcctctaccaaagggtgcacctttgacaagagctgcgctccgttctgggtgatgcgcaaacaacgtgcgcgccggtctctggggtctacctcgcggatcagaagtgttttggcttccagccgctccaccactttgccaagcgttgcgcgatcatagccgacatgtgtggcaagcgtggcctggtccacacccggatgcgcctcgagcgccgaaagggccgcatactgcaccggggtcaggtccagctgcgccgcgctcatcgtcgaggtgaaccgtgccaccgcaatctggttgagacggcggatcaatgtcgcgggttgggtgtctatctccagttccaggtctgacatgggcgtcgtccgttgcatgatttctgggcggagtctccatgtttcgtattttgttgtccgccctctgcccctatgagatggggcatggctctcatgtttcaaactctttccgattttctcgcgcatgggcatgacacggtgatcgatgtgcgcagcccggcggaatacgccgaggatcacgtgcccggcgcgatcaatctgccagtgctagacaacgccgaacgcgccgacgtgggcacaatttatgtgcagcagagcccgtttctggcgcgcaagatcggggcagcgatggtgtttcgcaacgccgctgaccatattgaacatcggctgagccaccacgaaggcagttggaaacctctggtctattgctggcgcggcggtcagcgctccggtagctttacctggatgctgagccagattggctggcgggccgaagtggtcaagggcggttatcagagctatcgccggcttgtgcatcaggcgatgtatgaggcgccgcttgcgcatcgtttgatgctgctcgacgggctcactggaaccgccaagaccgagatcttgaaacaggtcgccgagatgggcggccaggtgttggatctcgaaggctttgcggggcatcgtggctcgctcttgggcgagatgccgggcgggcagccaagtcagaaacgctttgaaagctacatcgcctgtgctcttgcccagatggatccggcacgtccggtgctcgttgaggcagaagccagcaagatcggcgcacggatcctgcctccgagcctctgggatgccatgaaggcggcgccacggattgatcttgaggtgcccttcgcggcgcgttgtgcctatttgctggaggcttacgacgacatcctgtcgaacgcagagaccctgcgcgaaaagctcggacttctgcgcgagcaccgctcaggcgctgtagtagatgcctggttcgagctcatcgcggcgggggataaacctgcgctggtggcgcggctgatggcggatcactatgatccggcctatcgcaaggcgcgcagccgatatgaggtgagcgaccagcgcaaggttgccttgacgggacttgacgaggccgcgcgcaaacaggcagctcagcggatcttggagctgctcgacgcatcctgagccttagagggccaagagcgctcctgctaacggatcacgataccttggtctgcatcacgtatttctccaatctttgcagcgtgatagccatggtttttcaactcacgaagggcgtcggatgcgcgcgctggatcaaccgaggccaatagcccgcccgaggtctgcgggtcaaagagcagcgcgcgcgcaccggctgtgccgatccctggcagaagagccgcgttgtcctcgaagatggtagagcgcacacctgcctccgcaagcgccgcagcgcccgccatcagcgggatggcatcaaagtcaacttcggctccgaggtcggaggccgcacagaggccctgcaaatgccccaagaggccaaagccggtgacatccgtcatcgcatgggccaccgggcgcaaaacagtggcggcgtcgcgctggctctggcacatcagatcaagcgcctctgccacacaggcgcccggcgctgtgcccgacatctctgctgccatcagcgtgccggagccaatcggtttggtgaggatcaggtgatcccccgcctgcgcccccgcaagcgtcaacgggggcgtctcgcataggccggtcagggtaaaaccaatggtgagttcttcacccaaagaggtatgaccgcccacgatggccgcgccggcggctgtcatttcctgatgggcgctatgcatgatctcggcgagcagacgttcctgcaagtccgctgattggcggggcaggatcagggttacggttgcggcctgtggatgcgctcccatcgcccagatgtcattgagcgcgtgttgcgcggcgatcgcagtcatcaccaccggatcttcggtaaaggcccgcaagtgatcggtgctgatgacctgtgtcgcgctgcccgtcatgagctgtgcggcgtcatcccccggcaggggcgtcacatcagcgcgttgcgcaccggaaaaagcaccaagccccgcgtgtagcgcgtgccgcccgactttcgagccacagcccccacacatgggtttgctcccaagcaccgcctccatgcctttggcgcggctgcggggcagggcgggggcgggcatctgtggcagggcggaaaacttgcccataaatttgcggtcgatgtgatccttccaccgccacaggaggccaccggcaaagctgcgcccgtcacgatccgcgagcgccgatttatcgcccatggaaatgagcttcagatagtccttttgcggctgataagacttcagcgatccgcccccaagcaccgccttgagattgtgatagagcacgggagcctgacgcacggcatagacgcccgccttgggtcggggcgcataggccatatgagcgcaatcgccacaggcaaatacatccgggtccgacgtctggagcgtttcagagatgaccagcgccccctcatgctgctgaaggcccgaggtctcaagccagccgtaggcgcgcgcgcctgctgcaccaaccgtgaaatcgctgtcgatcacccggccgccttcaagatgaatgcgacccgcgctcaggtggtcgatccgggtctgttgtaggatgcgtaccccgttggcgtccagcgccttgcgcaggcgggtctggctctgcgaggtcagcacagaaaggacagatccgctatcgatcagggtcgcctgagccagtcgctgctgctggcgcagcgcatgggccattgcgaggatcagctctacgccagcgacaccgccaccgatgcaggcgatgcgggccggatcggagccattgcgaaaggcatcccagcgggttgcaaacctgcccaggggcttggctggaatggcaaaatcgtcaaaacccaccagttctggcattgccgatgttatgccgatgtcgatggaggccacgtcataggcgatcgcgggtcgtcccggcacggtgatgcgctttgagatcgggtcgatttcttcagcggctcccaagatcagccgcgcgcctgcaaaacgcgcgagctttaccaggtcgatgtcgagggcatcccgcgtgtagtgaccggcgacaaaccccggcagcatccctgaatagggcgcggttggtccgggattgatcagcgttagtcgcacgccgggaagcggcttcatgccccacatccggagcaaaagcgcatgggtgtgtccgcctcccacaagaaccagatcgcgggtcaggggaaggcggggagcgtgcatcatgggcctccggggggcgcgggccgcggccccctgcgttaggcgtcggggctgctggccgtgtggtgttcaggtttgttgtgcgtcgcccagagcttgcagtctccggggacgggcagatctttgggctgtgtctgctggttgataaacaccttggcaaggaaatttgccgtgaccggggccgtgatcagcaaaaacagcgtgatcagcagctcgtgtgccgagatgcggccttcgacaacgatggcgtgcagcatggagcccagaagcacgccaccgacgcccagcgtggtggccttggtcggggcgtgcatgcgtgacatcggatcattgagcttgagcaggccaaaggagcccacaaaaccaaagatcccgccgagggcgatgaatgcggtgatgagaatttcagcaatcatgtctttctcctcactcgatgatgttgccgcgcagcaagaagcgcgcataggccacggtagagatgaacccgagcatcgccatgatcagcgaggcctcaaagaagatctcggaactgaggaacaccccaaagagaaccacaagggcgatggagttgatgaacatggtatcaagcgcgaggatccggtcggtcacctctgtgcctgtcacgactttccagaggttcatcagcatcgccagggcgaaacagccgaaggcgaagatataggcatattcgatcattcgaaaatctccttcaggcggcgttcgtagcgggtcttgatctcgtcgcgcacctcatccgggttgggcgcgtgcaggcaatgcaccagaagatagcgcccgtccgacgaaatatccgccgtcagcgtgcccggggtcatggtgatggtgccccccagcatggcgatggcctcgggcgcgcggatctcaagcgggatcgacacccaggtgggctgacgcttgctgttgggcatgaacaggatgatgcgcgccaccgtgatgttggccatgacgatgtcccagaacaccaaaagcacataggtcgcaagccgcagcgggctcttgagtttggggcggttgggccaatagggctgggtcacaaaggggatcagcaacccgaggaagaacccaaacagcagcgagttcggcgtgaccttgttgaccagaagctgccagataactgtcagcatcagcgtcaaaagagggtgcggaagcagtcggttcaggagtttcatcagttgctctcctccgatttgggcgcagcggcgccatcgtccttggccttgtctgtgccatctgcgtcgggctcaactaccgggcggtcgcggtttgcaaggaccgtctcgatataggcctcgggcgcaaagagatccgcagcggtggccgtggtatagcgggtcaccggtccggcaaagagggtcagcgcgaccagccctgccagaagcgagaaacaagccacgaagggcagggcggatgtgcgctctgtcgtcgttgtggcgctctcgcttgcgtcttcctccgcgggctgctcggagggcagaccatggcttttccagaagatcagagtgcctgcgcgggcaaatcccatgatggtcacaagagagctcacgaggatcacgccccagacccagactgcaagcgtattgtcgcgcgccgcgtcaaggatcagcagtttgccaaggaaaccggacagaggcggcatgcccgccgtggcgatggccgccacgaaaaagagcaccgagatgagcccgctttgcgccatgactggcttgggggctatgtccccgccttggcgttcgcgcaccatgtcggccacgaggaacagcgctgcggctgccagcgtcgaatgcaccgtgtagtagagcgcggccgaggtggcctcgggcgtaaagagcgcaatcgccgtgagcagcgtgcccacagaggtgatcgcgccaaaggacatcagcttgccgatttccttggaacccagaactccgatcgccccgatggcaatggtcaaaagcgcggcaggcaacaaccagctttccaccagcccatcgaccaccgcgacgtcgggtccgaacaccagcgtatagacgcgcaggatcgcataggcgccaactttggtcatgatcgcaaagagcgcggccaccggcgcgggtgcattggcataggaggctggcagccagaaatgcagcggcaacagcgaggctttgatcgcaaagaccagaagcagcatcaccgcgcccacgcgaataagggcgctgtcttcagccggaagttcggcgacgcgctgcgcaagatccgcgaggttgagcgtgccggtcaccccgtagatggtgccaagcgcaaacagaaacagcgtcgaacccagaaggttgaacaccacatattgcacgcctgcctgaaaccgccgggcaccaccgccgtggatcattagcccgtaggacgcgatcaagagcacttcgaagaacacaaagaggttgaacgcatcgcccgtcaggaacgcgccgatgacgcccatgagctgaaagagatagagcgcatgaaagttcgcgccgcgctcgtcccatttgctgccgattgcatagaggtttacggcaagggccagaacggtggtcagcagcaccatcatggccgagagccgatcaagcaccagcacgatgccaaagggcgcctgccagtcgccgagctcgtagacctgcacggtgccatctgcggcctgtaccgccagcgccatcgcgatggcaaccagtagcacattcgttgtcaaagagaatatgcgctgcaaatcaatgtgatagcgcaaggtcataatgatgaatggcgccaccaatgcgggcagcacgatgggcgcaatcagaagatggttcatgcgtcctctccctgcgcaggcgcagtgtcgtccatgttgatattgtcgtcgcgggcgctgagataggcggcgagcgccaccatcaccacaaccgcggtcatgccaaaggagatcacgatggccgtgagaaccagcgcctgcggcagcgggtcggcataggcgacttcggcatatttgttgaggatcggcggcgcgtctgtcgccagacgcccggtggcaaagagaaacacattcaccgcataagacagcagcgacgtgccaaggatcaccggaaaggtgcgccgacgcaggatcaggtagatcccggccgcggtgagcaggccaacggcggatgcaacaagaagctccatgctcttagacctccttcatgtcttgcgccgcagcatcgcgggcagggttgatttcaatggcatgctcagagtcggtgccgggctgccaggcaaagcgcgcaaggctttcaagagccagcatcaccgcgccgaccaccgccaagaacacgcccagatcaaagagcgccgccgtggccacctcgaactcattgagcggttcgatgtgaacatacccaaaggcggacgtcaggaagggctggtcgttgaaccaggccccaagacccgtggctgcagcgatcagcacgcccgagccgatgatcccgtgataggggtagcgctggcgttcggtcgcccagccaaagccagatgccatgtactgcatgatcaccgcaatcgccgcgaccagaccggcgataaagccaccgcccggcaggttatgccctcggaagaagatataggccgcgaccatcagggccaccggcatcatcatccgtgtgaccaccaccatcatgccgggatggctgtcgcctgcctgctccagatcgggtttgcgattaaggaggtaggcgcgcacgcgtgtcgacaggaccgcttcggtgagggcaaagatcaccagagcggcgatgcccagcacgatgatttcgccaaaagtgtcaaagccgcggaagtccacaaggatcacgttcaccatattggtgccgccaccgcctttgtaggagttctcgatgtgaaagccggagatcgccgggaacgcgaaatcccgcaccagcattgcatagatcagcccaccgacgcccagaccgccaatgatggcgatggcgccatcgcgcatgcgggtgaacagcggtgtttctaccggggtttccttgggtaggaaattcagcgccagcagcatcagaatgatggtgaccacctcgaccgagatctgcgtcagcgcaaggtccggcgcggagagatagttgaaggacatcgacacgatcaggccgacaatgccgatcaggatcagcgcgacaaagcgctggcggtggaacacaacgatacagagcgcagccatcgcaaggcagaaccaggccaccatgggcatcacgcccgcctcttgcatcggccgcgtcggcaggcccatcgtcccggtaacataggcataaaggctgatcgcgacggtgaagctcagcatgatcgcggcataccgcgtgagcgatccatcatgcagccgcccggtcagcccctgcacgagcccggtcagcgcgcttacgatcgcatcaaagatcaccttggcctcggggcgcgggagcgcattccatacgcgttcgagcgggcgatgcagtgacagaagcaccagaccaccgagcacagcgaccaccgacatataaagcgcaggtgtgaacccatgccagagcttcagcgaataatagggcagtttctcgccaccgatgaccgcactggccgacgccgccaccagcggcccgacgagcttggccgagaacaggccgatcagcaccaccagcaccaccagaagcgcgggggaggcatacatgccaaagcccggatcatgcggttttgcagggtagtcctcgcgcttggggccaaggaaaacatgcgcgatgtagcggaaggaatacgccgccgagaacatcgccgcaaaggtggcaagccctgcaatcatatagggcgacgagagccaggaggtcttttctgccgcatccagcatcatttccttcgagaggaacccgttgagcggcggaatacccgccatcgagagcgaagcgattgtcgcgatcacaaaggtcaccggcatcaggtgtcgcaacccgccgaggcgtttgatgtcgcgtgtgtgggcctcgtgatcgacgatccccgccgacataaagagcgccgccttgaaggtcgcgtggttgatgatgtgaaacaccgccgccacggctgcgtatttggtgccaaaacccaaaagcatggtgatcaggcccagatgcgagactgtcgaaaacgccaggagcgccttcaggtcatccttgaagagcgcaatcacggcacccagcaccatggtgatcaggcctgtggtggcaacgatatagaaccactccggcgtgcccgaaagcaccggccacagacgcgccatcaggaaaagccccgctttgaccatggtggccgagtgcagataggccgaaaccggcgtcggcgcggccatcgcatgtggcagccagaaatggaacgggaactgcgccgattttgtaaaggcaccgatgaggatcaggatcagcgccggcagatagagatccgaggattggatcgcgtccttgttttgcaagataacgctgatgtcataagatccggcaatatgcccgaggatcagcatgccaccaatcatggccagcccacccatgccggtgacggtcaatgccatccgcgcaccctgacggccttcgggcagatgtttccaatagccgatcagcaggaatgaggaaagtgacgtaagttcccagaaaatcagcaaaagcaggatgttgtcggacagaacaatccccaccatcgcgccctggaacagcagcaggtaggtgtagaactgccccatcggatcctgccgcgagaggtaaaaccgcgcatagacaatgatcaacaggccgatcccgaggatcagggtagcaaagagaaacccaagcccatccagaaagaaattggctgatagcccaagcgcgggcagccagtcgacgcccacatggatcacctcgccgcgcatcacggcgggggcgtgtagcatcaatccaataaaggcaagtcccgtcgccagcccggcagatgaggccgaggcattgcgaccggcgcggatcagaagcgcgggaaacagcgcgccgagaaacggcagggctgctattaggaaaagggacacgtcatactctccaggttgtggattgttgttatggcggcaataggctcctagctgttactggagtaaggaaatttccagtccggttccacaaaatccggcagaaaaagtcaggttttcgtatcgttcaggccaaatgtgacattgcgccgcatgttttggtgaggatgacactggcggtttgcgcaaacaggagcccgctcgggtcagcgtattgtgacgctggaccgggtgacttcagatgacgcgatcttgaagtccggccgcgatcttctgcgcacatccgccggatggctgtgataaattggatccgcaaagacttggatatgcaaatgaaacaggatcacactcgcacgcccccctcgacgcgatcctcccgccgcgtgtttcttttgggcggcggcgctctactgcttggggcagggggctggtgggggctgtcgcgacaccgtcccacccatgaaggccggatcctctcggtcgcgcaggcccacaaggacgcgcagacgggcgagatcctgctccttgacattcgcaccccctctgaatggcgccagaccggcatccctgaaggggcagtccccctagatatgcgccgggcggattttcaggaggcgctacgcgcacttcaggtgcaggaccccggtcgcccggtggccttgatctgcgccggaggcgtgcgctcggcgcggctcacccgacagttgcttgcgtcgggatttgaggacatcatcgatgtcccggaaggcgtctatggatccactgccgggccgggctggctcagcagcaacctgccggtgcgcccatggacaggatgatcccgctactggccacgattgccaccctcacgcttgtcgaaggtgccgccgcctgtgatacgccagagaccgcctgcagactggacactggcagctaccagatcgtgctccctgacacgcccgcagaccagacgccagccattgtcttcctgcatggccatggcggatctgcgaaaaatgtcatgaatctggagcagatggtcacagggtttacagcgcgcggttacgccgtaatcgccccaaatggcgcccgcggcgcgcaaggcgtgcgaagctggtcattcctgcccgagtttggcgggcgggatgatttcaccttcttgcaagacgttctgaaggacgcggtaaaacgctttgatgttgatcctgaacactctgttttggcggggttttcctccggcgctttcatggtgaactatctcgcctgtcgcgacccggatgcttttgcggcttatctgccggttgcaggcggcttctggagacctcaaccaaaggaatgcgagggccctttgcggctttaccacagccacggctgggcggatcgcgtggttccgctcgaagggcgcatcctgggcggcgggcgttttgtgcaaggtgacatctgggcgggtctggagctctggcgcgacacgctgggatgcgagacccatgcccctgctgaaatctggcaggacggagatctgtcgatgcgcagctggtcttgcggcgatggggcggccctcacgtttgagctctttcccggcgggcatagggttccttcgggctgggccggccgtgtcgtcgactggcttgaggccgacccaacagatgcacagaccggtggctgatacacagaccggtggctgacgcctcttttcttctaacgaaaaatatcccgggggtgcgggggcagagcccccgcaaacgccacggaacctctcactccgcggcctgcacgggcacgtcggtcccttgcgcgtgttgccgcaacagattgcggtagtgatgggccgcgcggttgatctgcggctcgttcaaggtctcggccgtgcccatccagccccgcggcaggcgcaggcccgacatcgcagagagcggcacggccagcacaagtgacagtgcgattggcaacagccagagtgacaccaggcccgcagcaatcccgatgcagagcgcgatgccactcacggtctctagaaggtggcacttgcacagggttgcaagactatactcaccacctgcgcgcgcctgcggggaccagcctttttgcaggccaaagacgctgcgcaacacggcaatcatctgctgaaccatcaggatcggcgcatagaggatcgcaagcaaaatttcggtgagcatggacagaaggaaccgccccagaccgccataatccgcgatccgccgcccggtcagaggcagggccgcgacagagaggaccttgggcgcgagcaacatggcataaatcaggacgatcaccgccacatggcgtggctcgctcatatccggccagttgggccgcagcgggtttgcctcggagaagtaggtgatcactgatccgccctcgtcctggccgatcacggcccagatcaccaagagcgcaaaccagaccggcgccatcagatagccgatggcaccatgcgcgaggtggaaccgcgacatcgcgtgaaacccggttgccgacaaaagacgcaggtgttgcaggttgccctgacaccagcgccggtcgcgctggatatgatccaccagagtggccggtgtttcctcgtaggagccgcggatgcggggcaggaacctcacgcgccagccagcccgtcgcaacaagcctgcctccacaaaatcatggctcatgatgaggctgctgcctccggtgaacccgcgcagctccggcaacccggccgacgcggcaaaggcgcgggtgcgaatgatggcgttgtggccccagtaattgccctcatgaccagtccaacgcgccagaccctcggccagcgcgaggccgtatacgccgttggcaaactgttgcatgcggccaaaaacggattgtgcaccaataagttgcgggaagctctgaatgagaccagcagccgggtcccgcgccagtgcatccgtgaggcgctggatggcgcggcctgtcatcaggctgtccgcatccagcaccaacatggcctcatagctgccgccccagcgggtcacccaatcatggatattgcccaccttgcgggcggtgttttcggcgcgccgacgataatagagcgtgatcccctcgggcaaatccgcgcgtaaagccttgatgctctgcagctcttgtgcggcaatctctgggtcgcgggtgtccgagagaatgaacatctcgtagcgatggggcccgccgatggcccgcagctcctcgagcatggaacgcgcgttgccaagcacataccagggcacttcgttgtagattggcaccaagagggccacccgcattggtttgcgcaggccgcgttcggggcgcggacgggtgcgcgagaggctgaacagtccaagcaggacggtcgagaccgtgaaagtgatccagaagaagttgaaagcaatcagaaccaacagcacccactccagcgaggtggtgccatctgcggcaaaccagccctgcatcacccacgcaagcgcaagagttgcaaccatggcaggcgaaaacgccagcacccgccacagcgccgcgccggttccatcccgggcggaggcagccggcgcgctggcgtcgtgaaattggcgtccaaagtcctgcgccggcatcgccagcggagcctctggtggcaacaacagcgcggatgtatctgtaaaaccaatgtctttcattcagacggtccaccgatacagccagacctcagaagcatcctgcccatccttgcgcagttgcgcgcgcagttccacatgggtttgctcgcccggatcaaaggagaacgccagtcgcatgccgccggtctccgggttgcgctgcaacacaccatcagatgtctcaagatgtggcgaggagatatgcaagctgaaggcctcgggatcggcttcaaacaccgggtgcgcctcaaaatcgatcaccatgagacgcccggggtcgccaaagatcttggcgcctgaggcggtgttgatcacgcgcggcagatccagcaccggctcttcgccccagctcagacgatagttgagatccacgcgcgcgccagcgggatagggtttttccggacgccaataggcgacgatattgtcgtagatttccttgtccgccgggatttcaaccagggtgacgcttcccgcgccccaatcctcgcggggctcgacccagagcgaggggcggcgatggtagtgggcttcgagatcggcaaagtccgacagcttgcgcgcgcgctgcatcaggccaaaaccggcggggttcttgtccacgaagctcgacacctgaagacgggtcgggtttgcaaggggtcgccagatgacctcgccattgccgtttttcatcaagagcccatcgctatcgtgaaccgccgggcggaaatcatcgaaccgctgatggttggtgccatcaaagaggaacattgaggtaagcggtgcaagacccgcatgcgtcaggtccttgcgtgcaaagagcgtcgcttccacatccatcacacaaggggtgccgggggtgatgtcaaaccggtaggcgcccgtcaccgaggggctgtccatcagcgcgtgcaccaccatgttttcctgcaaggggcccggcgcttcgagccagaagctgacaaattcggggaattcctcgccctcgggatcggccgtcttgagcgccagcccgcgtgcagacagaccatagttgttgccattggcaatcgcgcggaagtagctcgcgccctgaaagacgcagaattcggttttctttcccggatgatcccggtcgccaagatccgtgcgcaggcggaaacccgaataccccagcggcccttcggtcgacagatcgggtgagatctcgggatgtttcttgaaatgacccaaatcgaaggggatgcgatgcgccatcccgtcttcaacttcatggacgaggaccgggcgttcgaaatagaggccgggtagaaagaaatccacgttgtagctgcgatcagagccggcccagagcgccttgtcgaggtcaaactggatcgagcgatactggtcataactcagagcgagccagtcatcgggaaccgcgctgcgggccttgaacggccgttcagcgagagccttggcgcgcgcaatcacatcggcgcgcgaaaacgcttcctcggaggcgctggcgcgcgcggcgggggccagtgccgcaagtgacagggcagaggcgaattgaaggaaggaacgacggctgaatgtgctcatcgtttgcgtctccagggttgggatttgaaccagccggctgcaaaagcgcagccgataatgagagtgaagccagtgatattggccaacgcggtcacaaggatgccgcgctcggtttgatccagagccgcgccaatgaaacgggcaagcgccatggaaaagacaaagacagcaaggctttgctggccgaccttggtgatgagcgtcaggatctgagcccagaagcgcgcggccaaagagctgccacgggccacgaggttttgcccgttctcaccggccacaagccatgccaggtaagccagcgacaagaaatgcagatagcgcagaaggccaaagtcggttttctcgcgccactctccggtgatgccccatgcagggcggatcgttgcgcccaggtcgggggccgcactgttgagccagctgaagaccttccacgagccaaaaggcatcgacaggatcaagaaggcggccgctaacagtgccagtccgcggctgaccggcggtttgggaagccagcctgccataaaggcaaaaccggtaaagaacaaaagctgccagccgaaagggttgaagaaccactcgcggtccgaccaaggctctgcgggcagcgacaggccttcgggaccaagtccgacaacataagggttggccagaagccagagcgccagcgacagccccgccacagcccagaggccgagtttctgcgcgctcataatcgcaggcatcaaggccagcaccaccagatacatcggcagaatgtcaaagtagttcggcacataggtgagggtgaaaatccccacgatctgctctgcgggatcgttgaaaaacggtctcaggttcaatgagccgatgtagcttttctcaaacccgccatagagatcgagcgcggccatcgacatggccacaaagaaaaagaggccaatatgcgcccagaacacctgccagcagcggtaggcgacgcgcgcggtgcccaaccaccagccgtggcgctggaaagagccgccaaaggcaatcgcggaagccatgccggagcagaacacaaagatctcggttgcgtcggaaaagccaaagcgggccggaatccagcctgtccagcgattgcccgggatatgcgcgcagaggatgatgaacatcgcgatgccgcgataaaaatcaagtcgcgggtcgcgcgggcgcccctgcacatccgggcgcagctgcgccgtggcccccgcgagggggcctgcaccatcggcgccggtggatgtgggggcggcgcgttgagcgctgctttgatcgggcgccggaaaaggcgcgacgtctgccatctttttcaaatctcctaaaggatcactccgccgggacgctctgtgcgccgccctcgctttgggcggccgcaatcaaggcgcgacgggccatcgcataattgtcttcgccccctccgcgtttggcacgtctgtcatccaaaatggcctccacttgtgcccagttccccgagcgcagcccagcgtcgatggtcatgcgttcaaacacgtcccgctgggcatggctgccacctgcaagttgcaacgaatcccgtgacttagcgaggtagtcgaaggctgtgccgtagtggccttccccaaaagcctcaagtccctttgacaccgcgcagcccgggtcggccattctttgcgcggcttcggtcttgggctgggttccatcggcatggatccgccggatcagctggcctgtggccgttgcgcgatcgccgccgatcagcgccagcaggtaatgcagatcggcaaagatgaggctgccgtcctcagttcggttttcgcaaagctctgccagctcgtcccagcggtctccgacattgaccccatcaagttcgagccgcatcagcagcgaggtggcattggagatgtcgcggtagtcgtcggtcttgtccttgcgcacctcatcatcatagagccgcatcacctcgtcgatttggccgaggtcgaggtgcatcagggccttgtgccaccacacatggtagcgaaaattgttgcaatgcgcccaggcctcttcgcggccctcaagccaacccaatccagtcctggcatttccggtcatgtcatgcacatgtgccaccgcatgcagcccccatgcatcgtccggcgcggtccaaagtgcctgacgtccggtgatttccgcccggtcgaagtcgccggtttcctcgagggcaaaggcgtgacagcccaacagatagccatgtcctgcgtgctcggtcgaataggcgggcagcacacgctcgatagaggcgcgcatgccgcgggcgtcgcccatgataaagcggatcccatggctgagtttcatcgccagcgtgtcgcagggatgccgggtcaggatgtcttccatgcaggtgatcgcgcgcgagggatgacccgagagccaggcttccaatgcgtcgacatatttgcgttctcgcggcaacgcgccttcataggtcgacttggcaatagccagcgcctcgcgcgcggtcggcaagagttcggagcgcccaagcatcaacagcgacagccccttgatggcctgaccgagggcaaaatcgggcgcggcgtccaacaccgccccaaggtggccagcggtgcgcgccgcatgggcaagaacgccggtctgcgcgccgttccattccgcgagtgcgcggggatcggtgaggctgcactcttgtccaaaaatatcctgggtcatgggcgggtcactttcacaagctgggaacacgattgttaacagagatgctagcgaagcaatttccaccgcgcgccccccgctctcgctttggtgaaggcgcgtgtgggtttcggcgggaaaatgacatcaacgcggggggatgtgggcgaaaaccagcacaaaaacggtgctttgtgctggtggatgcagcgcgggcagaaaatcgcgcaggcttttgtaacattgcgaggcggccctctgggccacgtctgtgcgggatccgttcagtcggtctcaaagggcgcgtcagacgcgagaatctccgtgctgtccgccccgcatctgggcggagccttgcggtaggttacgggggtgcgcgagaacttgagcggattgcccaagagccgcacctcggtgtcaccggcctgcatcgtcaccaccatgtcccgcgcggcaacctgatcggtctcaaagacctgatcgagtgtcttgaccgggccgacgggcaccttggcggcttccatcgcggcaatgacctcatcggtgcgatagcgctgtagcgccgggatcaggatatcattgagtgcgccgcgatgctcaagacgggccggattggtggcaaatcggggatcttcggccaatccctcgagggcaaggaatgccataaatcggcgaaactgactatcattcccaactgcgaggatcacatggccgtcgcgggtttcataggtgccatagggcatgatcgaggggtgctcattgccgcgtcgcacgggtttctggccggtattgaggtaactcacaccttcgttgatcagccaggcgatctgcgcatccaccagggcaagttcgacctgctggccttcgcccgtgagatcgcggtggcgcaatgccgagagaatgccgatggtcgcatacattccgcacatcacatccgcgatgccgaccccgaccttgacaggcgcgccttcggggtcgccggtaagggacatgataccgccatagccctgtgccatcagatcatagccgggctttgcacggttcgggccggtctggccatagccggaaatcgacgcatagaccagatgtgggcagctttcgcgcagggaggcgtaatcaagtccatatttcgcgagcccgcccggtttgaagttctcgatcaagacgtctgcttgcgcggcgaggcgtcggatgatggcctgtccttcgggggcagaaatatccagcgcgagcgagcgtttgttgcggttggcggccatgaaatagggcgtgagatcagcatcttcggcgacgctcttgccccattgacgggtgtcgtcgccgcccgtggttgggttttcgaccttgatcacatcggcgcccagatctcccaaaagttgcgttgcggttgggccagccaggatgcgcgagagatccagcacttttacgcctttgagggcaccgtggggcaaacgcgcgggggcggtggtatcagatgcggccatcataggactccttgtcgatttccgcagcgatcacggtgaaggtggaggccgattgagccgcctccagcgcggcgcgcagctccgttcggttctgcacccgatggccttcgccgccaaaggcgcgtccgatggcggcaaagtcgtgccggccaaaatccacgcctgcattggggagctggcgctggcgttgtttgaggtcgatgagggcaagcgaggcatccacaaagacaacgaagattggggcaagacccagttctgccgcggtcgccagctcgcctgcaaccatcagaaacccggcatcccctgaaaagctcaccacggtgcgttcgggttcggcgagcttgcgccccatggcaagtggcactgcgcagcccatggtgcaaagcccggaggattgtaccagctggcgcggttcctggcagggccacatctggctcaggagaatacggtgtgcgccgctgtctgcggtcagcaggctatcggcgggtagggtgtcgatgcattcagcaatgacgcccgcaggcccccagtcgtcgctgcgggggaaggcctcggcaagggcggtcttggccttttcgatttccccgtttggccagggtggtgcgggttgaggtgcaaccgcaagcgcattgagcgtggcaggaatgtcggcgatcagtggcaggctggcctgatgcatgtaatgggtgttggcctcaggcgtgatgtcgatcacgcgggtctctgtggcgtcccaggccgcgcgccagccggtgcgcatttcgatcgggtcatagccgatcccgagaataaggtcgctggcctcgatgagcggcagcaagtggcgatccgcaagcggtgacagacccgcaccgcccagacagagcggatgatcctccggcaggatgcccttggccttgtagctggtgacaaaggggatttgtcgcgcctccagaaacgcgcgggtggcgtctggaccgccgggcaaaagcgcatcgagcccgaccaccgccaaggggcgtttggcctcgtgcagccagtcctgcgcctgcgccagtgtagcgcccgcaggcgcgcaggctccggcaggcgcgcggcgcgtgttgcgcggtgtggccggtgcgttggcaaccgaaatgggcacatcgatatgaaccggtccttgacgggcctcgcctgcgatggcgaccgccttgtcggcgatcacttcggctgcagcggcgttcagacggaaactggccttggtgatgggggcaaagacggcctgttgatccaggacctgatgggtgtaggtctgcgcctcatccgcgtcgacgcagcctgtcagcaccagcatcggcacccggtcctgatgggcattggcgaccacattgaccccattgagcgcgccgggtccaagggttgcgaccagaattgcgggcgccccatcgctgtgatgcacgccttcgcccataaaaccggcgcagttttcatgtttggcgaggtggaaggtgatcccagcgcgggtgagcgcatccacaagtgtcaggacttcgcccccgggcatgccaaaggcgtggcggcatccggcctcgtagagtcgacgggccaggatatcggcggcgcgaagagattgggtcatgtgtggtccgtattgatttggaaataggggattaattctgcagcgctgcggcagcaatctgggcaaagacgtcgtcgagccgcgccgcgacggccgtcagtgcggcgcctgcttcgggcacatagggcgcaaaaacatggctcggggtcttgtaggagagcgtcgcgctgccatcggggttttccgtaatatagaagcggatcggtgcttcgatcatggcggcggtggagagcgcaaggatctccactgcgtaggtgtttgcaaagacgccaacaacgcggtttcccggaatggtgatgccgcgggcagcggcggcgccggtggggccggcttctgtgacgacacccatattgtgtgctcttacggcagctttgaggtcggcgagaaggcgtttgtagtcctttgtgctggcatggatcgcccagccctcgcgcgcggcaaggtctgccgtcgcgggcgttgcaaaagatgcggccagagccgccgtcagcgccgcggtctgtgcggccgacagagcaaggctgaacacgagccccgtgctcagacggcggaggggatcaagagggcggaccatttagggctcctacgctgcggtttgcaccaaggtctacgcgcgaacgggctgaaatactcgtcacatttaagtgcgtaccgcgtcagacacggacgtggtgatccctcatttcgccgggtgcggtcaggcccagcccttgcggaagaaatgcgggctggcgccgaatttgcgtttgaattgccgagagaaatgcgtggcggagttgaacccggaggcaagcgcaatctctgtcaccgacatcgaggtttcattcatcaaggcgaaggcatggctcaggcgcatgtcggaatagacgtgcatcgggctttgatcgagatagcgcgagaacaggcgctccaattggcgacgggaaatatccagccgcgcgcaaagtgttccgatagagagcggctcttcgatcgattcctgcatcagttgcagagcactcagaaggcgctggttgcgactgccgatggcgacggcatagttggatttctgaggtgcagccccggaggtggagcgcacatgcaggcacatatccgcgacgatgatcgccagctgcttgccatggcgctgctcgatcagggtcagcatcatgtccgttgccgcgctgccgccgccacaggtcatcaaatttccagaaatctcgtaaatgttaggcgagggtttcaggtgctcgtatcgctcgacaaaaccgggttggttttcccagtgcagcgtgaagggttgatccttgatcagccccgcctgcgccagcgcaaatgcaccggtacagatccccccgagcttgcgcccgaagcgatgttcgcgccgcagccagttcagagtgatgtcaccggcggcctcctggggctccacgcctgaacacacaaagcccatggcatccgagggcagcggggccagcggcagatcgggggtgacaaccatcccgttggagcagcgtagcggcgcgccatcctgtgtcatgatataccagcgataaagctttgtatttgtgacctgatttgcaattctgagcggctcgatcgcggcggcgacaggcagcatcgtggcctttggcagcagcaggaaatagaagtcctgcggcgcgcctgcatgcggcaccttgagtgttgcggcggcgcctttttgaacaaaactatcgtcagacatcttcagggtccatcacaggaaacaggctgcgtgcaaagagatgcctctgccacatttaccagctagcgccgtgcggacgtggggtgccgggataatccgaccttggctcgacaaattgcgacacctgttgtcttcctgcagaaatggcacagctttgatgcgtgttgcaccgcgatagcgctgcaggtgcgaaaatgcgggtccgcctcttgcagcccaattttcgcaatactaagactcgggtaatcctctgtcgggtatggtgcccgtcatgatcccaagacaggcaggtccaatgattgatccaacagaaacatacatgaacacacttgtgccgatggtcgttgagcagaccagccggggcgagcgcgcatatgacattttctcgcgcctgttgaaggagcgtatcatcttcctcaacggtcccgttcacgatggcatgtcttcgctgatcgtagcgcagctgttgcaccttgaggcggaaaacccctcgaaagagatttcgatgtacatcaactcgccgggtggtgtggtgacgtcgggcctgtcgatctatgacacgatgcagtacatcaagcccaaggtgtcgacgctggtgatcggccaggcggcctccatgggctccttgctgctgaccgcgggcgaggctggcatgcgcttctcgctgcccaattcgcgcgtgatggtccaccagccctccggcgggtatcaggggcaggcgacggacatcatgatccacgccgaagagaccctgaagctcaagcgtcgcttgaacgagatctacgtcaaacacaccggtcaggactacgacaccattgaaaaggcgctggaacgggacaacttcatgtcaccggaacaagccaaggaattcggactgatcgacgaaatcgtcgaaaatcgcagcaaggccgacgacgcagaaagctaagcccggcaccacgcgggcctcgtgctcccttaaccatagtgtgcaggggagcacaatttgacattgtggccgcttgggagctgtcctaagctggccttacatcggggcaaattgacacgcgctggccccgaggcggatggaaaggtagaccatggcgacgaactcgagcggcgacagcaagaacacgctttactgtagcttctgcggcaagagccagcatgaggtgagaaagctgattgcaggcccgaccgtgttcatctgtgatgaatgcgttgagctgtgcatggacatcatccgcgaggagacgaaggcctccgggatgaaagcaaccgacggcgtgccgacgcccaaggatatttgcgaggtcctcgatgattacgtgatcggtcaggcgacggcaaagcgtgtgctgtcggtggcggttcacaaccactacaagcgtctgaaccacgcccagaaggccggcaatgatattgaactttcaaagtccaacatcctgctgatcggccccaccggctgcggtaagacccttctggcgcaaactcttgcacggattctggacgtgccgtttaccatggcagatgccactacgcttacagaggcaggctatgttggtgaggatgtcgagaacatcattctgaaactgctgcaggcgtctgaatacaatgtcgaacgcgcgcagcgcggtatcgtctacatcgacgaggtcgacaagatcacccgcaagtctgaaaacccctccatcacccgtgatgtgtcgggcgagggcgtgcagcaggctctgctgaaactgatggaaggcactgtggcctccgtgccgccgcagggtgggcgcaagcatccccagcaggagttcctgcaggtggataccacgaacatcctcttcatctgcggcggtgcctttgcgggcctggacaagatcatcaagcagcgcggcaaaggctctgcgatgggctttggtgccgatgtgcgcgaagagagcgatgcgggcgtgggcgagaccttccgcgatctcgagcccgaagatctgctgaaattcggcctgatcccggaattcgtgggccgtttgccggttctcgcgacgcttgaggatctggatgaggatgcgctgatcaccatcttgaccaagcccaagaatgctttggtcaaacaataccagcgcctctttgaacttgaagacaccgagctggacttcaccgatgaggcgctctcggccattgccaagaaagccattgagcgcaagaccggcgcgcggggtctgcgctccatcctcgaggatatcctgctcgataccatgttcgagctgcccggaatggagagcgtgacaaaagtggtcgtcaatgaggaggccgtctgctctgaggcgcagccgctgatgatccacgccgatgaaaaggaatcggccaccgcaggttgaaccggtccaaggctccgatgaatacgaatagcgaaaggccagtgtccccgtgacactggcctttttctttctcaactgctgggtgtgttaggagggaacagcacatgaaaagcgaagcctttcattatggcgatggcatagatcagttcgtcggccacttggtatgcgacgacagtcgagaggagcccgcgccctgcgtcctgatcgcgcccgcctttggcggcttgagcgattttgaacgcgcccgtgccgaagacctcgccaagctcggctatgtcgctctcgcggttgattactacggagacggcaagcgcgcggcctcgccagaggaggcgcagcacctcatggcaggtttgcaggcggatcgcaccgtgctcgcgcggcgtatgggggcagcgctggaggccgcgcgtgccttgccgcaggtggatgcggggcgcatcggcgcaatgggctactgcttgggcggcaaggccgtgctggatctggcgcgcacaggggccgatctgcgtgcgtgtgtgccgctgcatggcgtctatgaccgccccaattttgagacccagacgatgcgcgcggcggttctggtgctgcacggttgggacgacccgcttgccccgccttctgcgctcgaggcgcttgcggctgaactgaacgaacactgcgcggattggcaggtgctcggatttggacacaccgggcatgcgttcaccaaccccaacgccaaggacagcgctggtggcatgatctacagcgccaccgcaagttcacgggcctggactgcgctgacgggatttctggctgagacgtttgaaggcgccgcaagtgcatagcagaaatgcataatttgcagtgccgatgcgcgccaatccaccatagactttccatgtgacaaactgttcaagcgaagtggaaggacgcctcatgacgataaaacgcatttcttcgggcggagaatttgaggccaaggtcggctattgccgagcggttgtggcgggcggctttgtgcatgtcgccggcaccgtggggcagggcgaagatgtggtggcacagtgccgctcggctctggcgaccatcgaggctgcgcttgccaaggccggtgtgagttttgccgaggtggtacgcgtgaattattaccttcccgatgcgtccgagtttgaaccctgctggccgatccttgctgaaacctttggagaaaacccgcctgccgcgaccatgattgaatgcaacctgatcgcgccggaataccggatcgagatcgaagtgacagcactggcgaccccggcataggcgcgcgacagatggagcagacttcgcaaacggtgaccatccgccccgccattcccgtggttcgaatttttgatctgcagaaggcgcgcgactactatattgattatttggggttttctctggattgggagtatcagcacgaagaggatcttccgatctatatgcagatctcgcggtcaggctgcatcctgcacctgagcgaacatcacggggatgccacgccgggctctacctgttttgtccccatcgacaatgccatggcgcttcatgcggaactgggtgaaaaacgctatcgcaacatcaaaccggcgcttgatgcgatgccgtgggggctgcagatcacggtgacagatccctttggcaaccgtttacgcttctgtgagcagcgctctcgtggcagctaagggacgcgaaagcgtggcgatcttgctgtttcccgccgctctattcaccacttgaccgcgaaccactggacctcgggtcgagaatgggccatatcgggggagagattttcggagggacccatgggaatcctgaattcgcttttgcaggctgtgacttggtggaatggcgccacgctcaacacaatgatctacacccgccgcaagggggttaaggtcggtgaggacgatcagggcaacgtattctatcgcaacgcagatgacagccgtcgctgggtgatcttcaatggcgaggcagaggcgtcgcgcgtcagtgccgactggcatggctggttgcaccgcacttttaacgaagtgccgagcgagaagccgctgaaacacaaggattgggaaaagccgcatcaggaaaacctgactggcaccatgctggcgtacgcgccggcgggctcgatccgcgcgggtggcacgccaaaaccgcgcagcgattacgaggcgtggagccccgaataagtttacgccaaagggacgcgcggatattgcccgacgtccctttgcgatctggccaaaaggcaggtttgtaatgacccattccacaaccgaagtgctgaccggtggccttgtgctggccgtggcagcagggtttgcgttttatgccgcacaggccgcgggcctttcgcgcggcggcgatagctacccgctgacggcgtcctttcgctctctggaaggggtgagtgtcgggaccgatgtgcgtcttgctggcgtgaagatcggaaccgtgacggatgtggcgctcaatgcggaaacctttcgcgcggacacgaccttttcggtggataaaagcatcatgatccccgacgacagcgccattgtgatcgcgtcagaggggttgcttggtggaaattttgtcgaagtgatgccgggcggttcgcccttcaaccttgaggcgggtgatgagatcgtggacacccaaggggcggtgagcctgatttctctgctggtcaaatttgtctccggcggcggtgacgaatcctgatgaagcgcctgatcacacttgctttttgccttctggcatcggcgccgctttcggctcagacgatctctgtcgaggagcttgacccggtgatcgtgcagccgcgcgtccccgaaagccgtgagcgtgttgaacgcatcgaggcaaccgagggtacacttacgagcctgcgcgggctagataaggtcaacggcaagagtgtcgatgtcgaggtgcagaccggtggcacggcagagatcttcggcctgatcgtgactttgcgcgagtgccgctatccaacagagaacccctcgggggatgcttttgcgtatctgacgatccgggatcgccaggacggcaaagtgttctttgatggttggatgattgcatcgagccccgcgctcaacgcactcgatcatcgccgttacgacgtctgggttctgcgctgcaagagcacctgaggtgacgggagcgcgggagagatgaaatctcccggctggtccagcgcctcggcgagccttctgcgataagccgcgcggctgatttcccgccccccaagagacgccagatgaggcgtgatgaactgggtgtcacatagaatgtagccgcctgcgttcagacgatccacgagataggcgagtgcaatcttggaggcatctcgccggcgcgagaacatgctttcgccaaaaaaggcgcccccaagtgagacgccgtagacgccccccaccagcgcatcgtccatccagacttcgagagagtgagcaaatccgtcgtgatgcagctcttggtaacggtcaaagatttcaccgttgatccaggtctcttcgcgatcggcacacccctgcaccacgcccgcaaaatcgcggtttacgctgatgctgtaatcatcgcggcgaaggcgtttggccagagaacgagaaatccgaaaaccgtccaaaggcagaatgccacggcgctttggatcgacccagaacacctctggatcgtcgcggctctccgccatggggaagacgccgttcgcgtaagcatgaagcaggagatcagcgctgagcgtcatagattagcctagcacggggtagcagaggggcggaggttttaaaccgccgcccccagaaagatgtctcaggcctgaaggttggcttcaagccatttttccagccagtgaatgttgtactcaccggtgtggatgtctttttcctgcaagagcgcgtggaacagcggcaccgtggtatcgatcccgtccacaatgagctcgcccagcgagcggctgagacgcgcaagggcctcttcccggtcgcgcccgtggacgatcagcttgccgatcaggctgtcgtagtacggcgggatcgagtagccgtcataaagcgccgaatccatccgcacgccaaggccgccgggggcatgatatgcggtgatcttacccgggcagggcgagaaattcggcagcttttcggcattgatgcgcacttcgatggcgtgaccgttgatgatcagatcatcctgcgtgaacgagagcggcaggccagaggcaacgcggatctgttcacgcaccaggtcgacgccaaagatggcttcggtcacagggtgttccacctgcaggcgggtgttcatctcgatgaagtagaactcgccatcctcatagaggaattcgacggtacccgcaccggagtagcccatcttgccgatcgcatccgcgcagatcttgccgatcttggcacgctcttcctcggtgatgcaggggccgggagcctcttcaaagaccttctggtggcgccgctgcaaggagcagtcgcgctcgcccaggtgtacgccgccgcctttgccatcaccaaagacctggatctcgatgtggcgcggacgctggaggtatttctccatgtagacttcgtcgttgccaaaggccgctttggcttctgagcgcgcggtctggaacgcttgaaccagatctgcttcggtctgggccactttcatgccgcgcccgccgccaccggcggtggccttgatgatcaccggatagcccatttcggcggcgaccttttttgcggtctccacatcgggcacaccgccgtcagatcccggcacacaaggaatgccgagcgcttttgcggtgtcttttgcggtgatcttgtcgcccatctggcgaatatgttctgcggaggggccgatgaaggtcagcccgtggtcctcgacgatctgcacaaaattggcgttctcggagagaaacccgtagcccgggtggatcgcctgagcgcccgaaatttcgcaggcggagatgatcgcggggatcgacagatagctctgggcgcctgacggtgggccaatgcagatcgactcatcggccatgcgcacatgcatggcatcggcgtcggcggtggagtgcaccgcaacggattggatgcccatctcgcggcaggcacggatcacgcgcagcgcgatctcaccccggttggcaattaagattttgtcaaacatggcagggccttactcgacgatgacgagcggatgaccaaactcgaccgcggcgccatcttcaacaaggatgcgcttcacggtgcccgatttgggggccgggatatggttcatggtcttcattgcttcgacgatcaacagggtgtcgccttcgctcacttgctgacccacggacacaaaggcagaagcgcccggctcgggtgcgagataggcggtgcccaccatcggggaggtcacagcgccggggtgattggcaggatcgtcggatgcgggcgctgcggctgcgacagcggcgggcgctgcggcggccggggcaggcgcgggggctgctgcgacgtgaaccggcgcggcgggagcggggtgctggcgggagacgcgcacattcaggctgtcatcttccgcgtagtcgcgcttgacctgaagctcggtcaggtcgttttcgcgcaaaagctccgccagagccttgatgaacgccacatctgcttcgtgagatttatttgtcattgtgttcctcggcagggtcctgtctggccccgaatgcgtccggggcggaaatttttggccttataagccatagctgaccataaggaaagcgtgcttgattgcctctgaagatgagggggaaagcctctcttttcaatcatttttgcagggaaatatcggcctctctgcgggcttcaaagaggcatgccactgagttttgcgaccagttcgggcagctttttggcgttgaatttcaccaagaggcgcgcccggtgagtctctaccgtacgataggagagatccagtttgaggccaatttccttggccgagagcccccgacaggtgaggatcgcgacttcgcgttcgcgtggggtcaggctgacaacggggcgctcctcggagagatcggcaaaggaccatacaccggcctgaaacgggcgcgcaccgtcgagggatcgcccgcgcacccggcaccagaacagcgcgcccgacgtgcgacgcataatgcgttcgtcgtggtagattccgctttgtgattccggcaactgcaagatctcgcctatgcgctggtaatcctcggcgctgggataaagcgcagcaattggtgtctcgcaaagcgcctctgggggggcgtcaaagatctcggcaaagagcagattgcaccgcttgatgatgcgatgttccaaaagcgcaagtccaacaggcgcatagtcaaaagcgggatcagttgcgggatcagacatggcccggttctaaagcgggccttggcgcaagggaagggcgcatgtgtgtcacggccgcaaggtctgctcacccccgtcgaggtgtgtgaaaaaagccggacctgaaaacaggcccggcccaggtcgtgtgagtggcagggatgtgccgctcacgacggagtaaccagatggcgcgccggcggcgtcaccttttcagcgtccgatccgcagatcagatcgcgaggtattcagaacgcagttcttcgttttcgagaacctctgccgcggcgccgtcaaaaacgatcccgcctgtgtcgaggatcaccgcccgatcagccagttgcagtgcccgcaccgtgttttgctctacgaggatggtggtcatcccctgttccttgatgtggatgagggttttttcgatctcgtccacgatcaccggggccagaccctcgtagggttcgtcgagcaacagcaccttgatgtcgcgggccagggcgcgcgcaatcgcaagcatttgctgttcgccgcccgagagtgtcacgccctcctgcttgcgccgctcgcccagacgcgggaagagctcgtagaggcgctcgatcgaccagccgattggtggggcaatctgtgccagctgcaggttttcctcgaccgtaagaccgggaatgatgcggcgatcttcgggcaccagacccaaaccggcagtggcggcctcgtggctttccatcaggtgcagcggctggtgatcgagccagatctcgccccgtgttaccatcggagagccgatgcgcgcgatggagcgcagggtcgaggtcttgcccgcgccattgcggcccaaaagcgcgaggatttcgccctcatgcacattaaagttgatgccctgcacgatgtagctttcgccgtaataggcatgcacatcccaaaccgacagaaaggcaggggcggtggccgcgtggttggcgctcttggagaaatccggttttacgttcatggtcttgtcctttctccgttacgcggtctcgccgaggtaggcttcgcgcaccttcgggttgccccggatgttttgcggatcgtcctccacgaggggggtgccctgcgccagaacggtgatccgattggcaagcgagaacaccacatgcatgtcgtgttcgatgatggcgatggtgatgtcgcgctcgtccgagatctgtttcaacaggtcgatggtgttgttggtgtcggcccgcgccataccggcggtgggctcatccaacaggagcagccgtggctcctgactgagacacatgccgatctccagccgccgtttgtccccacgcgagagcgaggccgcgtgcatatggcgtttgtcggccatattcatctccaccagcatcgcttcggcacggtccagaatgtcgcgctgcgacatcactgcggcaatggcattcagctcaaacgcgccgtcccgtttcgccaggcaggggatcatcatgttttcaagaaccgtcagatctccaaagatttcaggcgtttgaaagacgcggctgatgcccatctggttgatctcatagggcgcgcgcccgagcaccgactggccgtcgaacatcactgacccggtgtcggggatcagcttgccgacaagacagttcagcagggtggatttgccggccccattggggccgatgatggcgtggaccgagttctccttgacggagaggttcacatccgacagcgcctggaggccaccaaagcgtttgccgacgtttttgacttcgagaatgctcatgagggtctccttattccgccggattggtgttgctctgcttggcgtcagacttcttgcgccccttgagccagtttccgacccgctgtccgccttccacaagtccgccggggaggtagatcaccaccagcatgaagaggatgccaagcgtcagatgccagcccttgccgataaaggggtggatgatgaaaaccacaaagtcctcaagcccatccggcaggaagctgaaccagctgtgcagcacgttgtcgttgatcttggagaagatgttctcgaagtatttgatgaagcctgcgcccagaaccggaccgatcagcgtgccagccccaccaaggatggtcatcagaacgacttcgcccgatgcggtccactgcatccgctccgcgccagccagcgggtccatggaggccatgagaccaccggcgagccccgcgtacatgccagagatcacaaaggccgcaagcatatagggacgggagttgagaccagtgtagttcatccgctgctggttggatttcaccgcccgcagcatcatcccaaagggcgagcggaagatgcggatcgcgagatagaacgatgcaagcatcaccagcgcgcagaagtagtagccaaagttgaaggtaaaggaccagccgccgatcaccagttctgcactgtcgcgcatctccagcccaaagaggctcgggaccgggatattgccctcggcggtctggctggcgccgagaatgcgcggatcatccagcgccaactgcaggcccgtttcaccgcccgtgatcggggtcagaaccgaataggccagcgcaaacatcatctgggcaaaggccagagtcagaatggagaagtagatccccgagcgccgcaggctcacaaagccaatcaccagcgaaaagagaccggagaccagaaccgacagcacgatggcgggcagcacgttcatgctcagcagtttgaacatccagacggccgcataggaccccaccccgagaaaggccgcgtgaccaaaggagaggtagccggtgaggccaaagaggatgttgaacccgatggcaaagacaccaaagatcacaaagcgctgcatcaggtccggatagcccgcgttgaactgcgccatggcgctgtcgacggggaaggggttcaggatgaacggggcgaacatggtcagaacagccacgatcatgagaagtttgagatcggttttttccagtttgaacatgtccttagtcctccatcacgcctttgcggcccatcaatccacgggggcgggtgagaagaatgatgatggcgaccagatagatgatgacctggttgatgcccgggatgatgtcgatgacctcgcgcatggaggcaaagctctcgagcacgcccagaaggaagccggccagcaccgcaccgggcagggagcccatgccgccgacaaccaccaccacaaagctcagcacgaggaagtccatgcccatgtgatagttgggcgagttgatcggcgtgtacatcaccccggcaagccctgcgacggcggcggccacaccaaagatgatggtaaagcggcggtcgatgttgatccccagtagccccacggtctcgcggtcggccatgcctgcacgcaccaccatgccgaaggttgtgaactgcaggaaggcaaagacgccgccaatgattactgctgcaaagcagaagtagatgatgcgccagtaggggtagatgatgaggttggggtcaaagccgagtgcagccccgaaatcgagcgagcctttgaaggcttcgggcgccggggtcgggatcgggttggcaccgtaaaagtatttgatcacctcctgcagaacgatcgccagaccaaaggtcacgaggatctggtccgcgtgggggcgcttgtagaaatgcttgatgagaccgcgttccatgatcacgcccacggcaatcatgatcgggatcgcaaaaagcaccgacagcggcaccgaccagtcgatgatcgcattccccatctcgacgccaaagatgtcgtgcacataaggcacctcaactttcagcggattgccgaggaagtcggttttggtttcatcaatgatcgtatggctcagcgtcaggatgcgcgacagcgtcactgcacagaaggccccaatcatgaacagcgcgccatgggcaaagtttacaacgcccagcgtgccgaaaatcaatgtcagacccagcgcgatcagcgcataggccgagcccttgtcgagcccgttcaggatttggaggattattgcgtccatcgtcccacccttcggaagtgtgagtgcaaggtgaacaaggcccggagggcagagggctcaaaaccgcattggttcttaacggggtcccgccgggggcttgtcgttgggtgctggcgaccagggcagcgggccgtcttgcagtggcccgctacctgtttttgttcaccaaacagtgtttagaagtcgttcgttccggcgattaggcgccgttgttgcaggtgccgagcgcaccgccctggaactgcgggtggttcgggtcataggtgacctggccaaccggggtgacttcgacgatttcgagaaggtcgaactccgaggtcgggttctctttccctttcacaaccagcacgtccttgaagcactggtgatcggcgccacgatagagcgtcttgccgttgcccagaccgtcgaactcatagtcctcgagcgcttctgccacggcgcagggcgcaaaggagccagcgcgttcaaccgcgtctgcatagagcagggtctgcacatagcaggtgtgagcggcctggctcggcgggaagccgtatttggtgccgaaggagcgtacaaaggccttggaaccttcgtcctgcagcgaccagtgccagttggtggagccgaagatgcccttcacgttggcgcccgcacctttcgccatcaggcgggagtagagcggaacaacgatctggaagtccttgccgttcacctgcttgtcgcgcaggccgaactgcaccgcgttggtgagagagttcaccatgttgccgccgtagtggttcagaaccagcgtgtcggcaccggactgcagaaccggggcgatataggacgagaagtcggtctgggttagcggtgttttcaccgcagccacggtttcccagcccatcgcttcggtggaggaccggactgcttcttcggtggtatagccccagttgtagtcggcggtcaggtgataggccttacggtcggtgccgtaggcattcgccagcaccggcgccagcgccgcaccagacatgtaagagttgaagaagtggcggaaaccattggcccgcttgtctttgcctgtggtgtcattggagtgggtaagacccgccataaagattacgcctgcctcttggcagagcgcctgcacggccacagccacacccgaagacgagccgcccgtgatcatgatcgcaccgtctttttcgatcatggacttggcagaagcgcgcgccgcatcggatttggtctgggtatcgccggtgacatattcgactttcttgcccaggatgccattgccctgcagagccttggagctgaaggtggtgagcatgccgccatcgccaccgccgttcaggtgctcgaccgccagctcataggcgcgcaactcgtccgcaccttcatcggcgtaagggccggtctgcgggacgttaaagccgagtgtaacagtgccgccagtggggttgttggtgaatgcatgcgcgctttgggccgtaaagatggtcggcatggcgagccctgcacccgcgaccgcaccggttctcagcaggccgcgacggcttacgtctgacttggacatttaaattcctccctaggattaaaaaaggcgatgagcgactcctcactttcacgcatcaccttgcaacattgtgcaaaatgagtatgggggtgtgttgtaaaccaccgcaataaaacgcttgttttgaatgttttttctgtaaagaaatgtaaagtgaaggcggtgttgcggtaaattttcttattctgccgcgcagaaagccgttgataacgtggcgttttgcaacaggaggcacctcatgcccggagacagtctgacaggcagccgcatccgcgagaggcgcatgatgctggggttgcgccaggccgatctggcccgtgatgcgggcatctcggcctcttacctcaatctcatcgagcacaaccgccgcagaatcggcggcaaactccttgtgaccttggcgcaggtgcttggcgtcgagccttctcttttgaccgaaggggtcgaggcgacgcttgtggcgtccctgcgcgaggctgcggcagaagcgcgcacgccgatggtcgaactcgatcgggtggacgagtttgcaggccgttttcccggttgggccgaggtgctggcacaaacccatggtcgcatcggcgcgctggagcgtaccgttcggtcgctctcggatcgcctcacccatgacccgcaccttgccgcctcgctccatgaggtgctttcaacagccgctgcgatccggtccacggcgggcattctcgcagagcccggagagctcgaagcagaatggcgtgaccggtttcacaagaacctcgatcaggatgcgcagcgtttggcggacagcagccgcgcgctggtccggtttctggatgaaagcgatcaggacggcgagcggcgcggcatcccgcaagaggaagtggaggcgtttctcgtcgctcgcgagttccatttccccgaactagaagagggcaccgcaagcccgcgcgagcttgtgcaatcggtgagcgagcttgaaagcaccgctgcccgcaagcttgccgaggcggccttggaggtctaccgcgaggacgccgaacgcatgccgatggccgcgctgacggccgccattgcgcgacacggtctggtgccgggcaaactggcacaggcgttggatgtggaaatctatcgcctcttgcgccgccttgcgatgatgccagaggatgttctgggggtgtcagtcgggctggtgatctgcgacgcctccggttcgatcttgctgcgcaagcccgtcgcggggtttcctctgccgcgctttggcgcttcctgtccgctctggccgctgttcaccgcgctttcgcaaccgggggtgccgatccagcgaaacgtgcatcaagaggggcgcgcggcgcgcgacagcacctgtttcgcgatttcctggcaggccgagccttcggactttgaccgcgaccccgtcctgcgctcggtgatgctgatcctgccgtctgagcagccagaccagccccccgcatcaggctcgcgcccggtaggggcgagctgcaggatctgcgcgcggcgcggatgcgcagcaaggcgcgagccgtcgattttacgcgatgcgagaggcgccaggttaacgcaactctaactgctgggtgacagccgcgctgctttcatgcaaagattgctaccgcacccggaggaaccggtaacacggtgtggtgcttggggaggacaaggacatcaatggctggacgagtcgttttgattgaagacgaagccaatatcgccgaggcgatccgcttcttgttgtcgcgcgaggggtggcaggtcgatgttcatgccgatggcggcactgcggtttccgtgatcgaagccaaaaaacccgatctggtgattttggatctgatgctgccgggcaagagtggcatggaaattatccgtgaactcagggagttgagcgcgttttcggatctgcctgtgctaatgttgaccgcacgcgggcaactcaaggaccgcgaaatggcagagcgcgccggtgtgacccgttttatgaccaagccgttctccaacaccgaagtgttgacggccgtgcgcgatcttgatgcgcaggcgcggcagtctcaggcgcaggcagcggccgtgcgcgacgccggctgagccgcgcgggatgatccgatctgatggcgcaggcagcaaggacgagctgcgcgctccttttgtggagcgccggacgtatcgccgtcgtcgcctgatggatattgcccggattgcgccaatccttggagcgctgctgtttctggtgccgctgctatggccagagccgtctggcccagagacgtcgcaggccgccggcagcatgtccggtgcaatgatctatatctttggggtctggatcgggctcatactctttagcgttggattttccgtcgcggtcaggctttgggcggtccattggacgggggtcggggcgccgaccgacactgcggatgtgctggccccgcgcgccctgcctgagactgggctcgagcggacagacacgcctcgccccgccgacaacagcgacccggagggcgatgcatgacctcgctcaaccttctggcagtcgtgagcattggctatgtggccctgctgttcatggtggccttttgggcggaccggcaggcgctgcgggggcgcagcgcgcgctttatgcgctcgccactgatctacacgctgtcgctgtcgatttactgcacggcctggacgttttacggcgcagttggctatgcggcgcgctccggcatggaatatgtcaccatctatctggggccgaccctggtgatgatcggctggtggtggggactgcgcaaactggtgcgggtcgggcgcagccagcgcatcagttcgattgccgacctgctctcggcgcgatacggcaaatccaacgtgctggccatcggagtcacggtgctcgcggttgtgggggtcacgccctatattgcgctgcaattgcaatctatcaccctttcggtcgcgatctttgccgaggccgacccctctcgcggccacaatgaatccggcacggtgttctggattgcgatgggccttgcctgttttgccatcctctttgggacgcgcaacctcaacgccaacgagcgccaccacggcgtcgtcatggccgtcgcccttgaggcggtggtcaagctcattgcgctggtggcggtgggcgtgttcgtggtctggggcatcgctggcgggatcgaggaaactcttgcccgcatcgaccgctctcccatcgggcattggcaggtggacggcgggcgctggacggcgatcacctttctggcagcggcggcctttgtctgcctgccgcgcatgtttcaagtgatggtggtggagaacgaggacgaacgccacctacgggtcgcggcctgggcctttccgacttatctcctgctcatttcgatctttgtggtgccaatcgcggcgatcgggcttgagcttttgccgcagggctccaatccggacctctttgtgctcgccttgcccctgtcccaagggcagaacggtctggccatgctgtcatttctgggcgggttttcgtcggccacctcgatggtgattgtcgccgccatgagcctgtcgacgatggtttcaaaccacattgtgatgccgatctggttgcgctcgaccggggccttcaaaggggcgtcggtttctggggatgtgcgctcggtcgtgctttttgcgcggcgtttttccatcgccgcgatcatggcgctcggctatgcctactatcagatctcgggcggcggcgcagcgctggccgccatcggtctgatcgctttttcgggcatcgcgcagatcctgcccgcgctggtcggagggctgttttggcgcggtgccacacgcgcaggcgcgcttgcggggctgaccatcggctttgtggtctggagctatacgctcttgctgccagaggtcgccggaggcgtcttttccaatgccacgctgtcggaagggccgtttggagtcggatggttacgcccgcaggcgctctttgggatcgagggctttgaccccatcgtccattctgtcctctggtccatgagcctcaatgtggcagcctttgcgctggtctcggtcctgagctttccaagccccatggagcgtctccagggcgcgcagttcgtgcatgtctttgaccactcggcgggtcccggtggctggactggctcggtggcccaaagcgaagacctgatgattatgtcccaacgcatcctcggccccgaagaggcacagaagttctttcaggcggcgctggaacgtcaaggcggcccggggccattgccggagccgacaccgagttttctcgagcaactggagcgcgaactcagcgcctcgattggggcggcggctgcccatgcgatgatcggccagattgtcagcggtgcagcggtgtccgtcgaggatctcctggcggtggcggacgaatcggcacaacttctggaatactcgagccgccttgaggcgcaatcaaaagagctctcgcgcaccgcgctgcagttgcgggagaccaaccagaagctaacccgtctctctgagcagaaagatgcgtttctctctcaggtcagccacgagctgcgcacgccgatgacatcggtacgtgccttttccgaaatcctgcgcgatgagccttctctcaatcccgctgagcagcataaatacgcatcgatcatccatgacgaggccctgcgcctcacaaggttgctcaatgacctgctggatctgagcgttctggagagcgggtccgtttcgctcaatgtttcgcgccggcctctgggcgatgtgctggatcatgcgttgtcctcggcgctggcgggcgcggagggtccgctgcgggtggtgcgggatcgcaattccgaggctgtggagattgaaaccgacgtcgaccggctggcgcaggtcttcatcaatctgatcgccaatgcgcagaaatactgcactgcagctgcgccggagttgcgcatcaatgtgcgggtctttgccaaccgggtagatgttgaattcatcgacaatggcgctggaatccctgcggattttcgcgaaatgatctttgagaaattctcacgcgtgacacccgaacgcgcaggaggggcaggtcttgggctggcgatctgcaaggagatcatgcgcaagctgggtggtgatattcatctgcttgcgacgcaaaaaggggccgcttttctggtctctttgccacgagagacgaaaatagaagaaatcctctgaaatttgtaaaggtcttggtaaccagcgctgggatagaaccgtctgcatacgggtgcggaaggcttcgggttcatttatgacggataaggatcaaactgaggaaggcaatcgcgcggtcgggggactggcgcgcaaacttgcagcctcaaaagagggcactgccgggacaggcggctcgctcacgctcaaggccttgcgcagatcggtggcgcgggctgccgaggatctgtgcgaattgcccatggcagtgatcgcggcacgtcagaccaaccgcgtgcccgaggatctgaccggccttctttccgataaacacctccttgtggttctggattgccctgcaggacggattggtgctgcgacactggatgcggcggcggttacagctctgattcaacagcagaccatgggtaccgtgctgggcatgtccggggatgagcgcaattatacgcccacggacgccgccatggtggcggaattccttgaaaagctgtttgccaaggtctcgagcctgctcgaagaccagaccgacctgagcatcttcgaaggctatcgctttggcgcgcaggtcgaagatgtgcgcacacttgtgctcggtatggaagccgaggattaccgggtcatcaatctcaacgtcgatctcgccactggcaagatgcagggcgaaatctgtctggttctgccggaaccgtctgtcgatgaatatgacgaggccaatgcgatccgtggcccgcgtctggggtcgagcgttggctccatgcgggcggaactgacggcggtcctgtgcaagatgcgcgtgcctttgcgccagttctccaccctcaaagtgggagagctcttgccgctcgatcaggcctatctctacgagaccgatttgattgccatcaatggtcaggccattgcaaagggacggttggggcagatgaatggcgcgcgtgccgtgcgtctggatcagcagcgcacccgtcttgtgcctcataacgaaggcagtttttccgacgggatcggtcatggtggggcgcccgcgctcgaagacaacacgcttgatctctcgattgccgcgcatggtctgcaggaacccggtgatggccttggtggcgatctcggtggcatgatgggcggcgacctaggtgtcgatttgggcggtgatcttggcggcgacctcggaggcgattttggcggcggccttgaagggggcgacttgcccatgggcgattttgacgccatgggagagctgcccgaactgcccatgaatgaccttggtgattttaacgccgatgacacggcggccgagatctcggagcttgctggtctgtctgatctttcagagaccggaacataaccacagcgccgcggggcgcatcagctctcttggaaaaatatggcccacggtggacaccgcgggccgtcattgcgactgatcttcgtcagggcgtttccttcgcgtgatgccgggacaatcgcccggagatccgcgctcgggaatccgtggcggagactaccccttaagggcctcaagcgtggggcgcaggcccgaaagatcatacccagcctcctgcgtggtcgacatgatgtcatccaccgaaatctctggattggccacctgacccagcgcccagatcacggaacaccgcgtgcccgaggcgcaatacgccagcaccggaccttctgaactttggacaaaagcgccttgtttttcaacgttttccggcgtcatcgtctggtgggtgagcggcaggacctgaaaagacaacccggcgtcttcgacggctgcgcggatcgcctcggcctgatggctgggcgggacttctgcatcaggtctgttgcagatcaccgttgtaaaaccggcggctttgattgcgggaatatcctccacggagatctgcggagaaaccgagtagcggggggtcaatgtgcgtgcatccatgcggtatcgtttacgcctttgtcccgcattggtctagatcgaagcgccgtacaggttcgatctcgggcaggggttttggtcctgcaggaccggaatacacgcaacgcaaatgggcaacgtgccttttattgcagccttaacgcttggaatgcgtcaatttgcggaattgcaggggcacatagattgccccaccttttgatttgagtagacttgatcgacgcagcgcgtgccaggctgcgaatacagggggctttggttgacctgtaagggaggagtaacgaatgacatcgcaacagttgattgaacgtgcctgcgatcttgagcaggagatccgcaccgcgtctgaggccgctcggcaggatctgcatcaagaatttgcacgcattctgcgacggatcgaagcggccggcgtgccggtgcccgggcatctgcgtcgcacggaacaagtgctgaacgacgaattggtcgaaagccagtttgacaacatgccgatctgaccggtgctgcgtggcctgatgctgcatcaggccacgggtgttcagcgcaggaacagcccgaccatcaccagcatcagcccaagcaccgagagcaacaaagcgccgaggttcttgggcagaaccgactgcaagacgtcgcgcaactcgtcatcggtcagccccttgcgtttggcgcgtacgacggtccacacgcaccacaccagccccaccatacccaggatcgacaggccgccaccggcccaaatcaggtattccatcgcttgccatcctcttgccactgcgcacttggcgcacgttctgcgcctgcgctctcacgggtgaacaagcgcctacaagagtggtcgcgccactgcaagcaaatgcaggcgaactccagtcttgcgaggcgtgcagcagccctgtatccctctgcctcaaccgggttcaaccggagcagttgaggcaatttgcacgagggccatcccatggacatgaccgaagatgaaaagagtgaaaactaccgcgtgacggctggcgaactgcgtcagtttgtcgaacggttcgagcgtctggacgaagagaaaaaggcgatcgccgagcaacagaaagaggtcatggccgaagccaaggggcgcgggtatgacgtcaaggttctgcgcaagatcatcgccctgcgcaagcgcgacgaaaacgacatcgccgaagaagaggcggttctcgagatgtacaaagaggcgcttggcatgtcctgatcggggcatttcagtgtggttttggaacggggatctggggcaactcagatccccgttttgcgtctgaagcccccggttcgctctcatcttgcaacaatattcgaatgtgccacagttttgggcactgtgattttgcgaacaatatcaagcctcaagcggaagatttttatctcgtgatgcagaataatgcagcctctctaaattttaccagttgataaaaaaatcgcctgtggcactgtgtggataacaagaagacatcactgactgtccaatttcagcaaggagacacccaatggcagtaggccaccaggtatccggcgtgcgttctgagcgattgagtgcccaggaaatcgccgagaacttcgcagatcttcacgcgccttatgacgcgcatgaagccgcggttgcagcggatcgctgctatttctgttacgacgcgccctgcatgacggcctgtccgacaagcatcgacatcccgcagttcattcgtgaaattcaggcgggtcatgccgagagcgcggcaaagaccattcttgagcagaacatccttggcgggatgtgtgcgcgggtttgtccgacagagacgctctgcgaggaagtctgcgtgcgtgaagtggccgaaggcaagccggtcgagatcggtcgccttcagcgctatgccacggatatgctgatggaaaagggcgcgcacccctttacccgtgctgcggcgacaggcaagcgggtcgcggtcgtcggtgcggggcctgccgggcttgcggcggcgcaccggttggctatgcacggtcatgaggtgacaatctacgagtccaaacccaaggcgggtggtctcaatgaatttggcatcgccgcctataaatcgaccaatgattttgctgcgcgcgaggtcgagtggctgctccagatcggtgggatcaccatcgagtacggtcagggcctcggcgcgggcctcacgcttgacgggcttcaggcggatttcgacgcggtgttcctgtctgtcgggctgcaaggcgtcaacgcgctgcgcgcagaaggtgaagacaaggacggcgtgcgcgatgcggtggatttcattgccgaactgcgccaggccgaagatctgcgctcgcttccggttgggcgcaatgtggtggtgatcggcggcggtatgaccgctgtagacgcggccgtgcagtccaaactcttgggtgccgagaatgtgaccatcgcttatcgtcgcggtcgcgacgccatgggcgcaagccgttttgagcaggatctcgcggcctccaagggcgtgaaactgatgttcaacgtgatgcccaaggcgatccatggcaacggcgccgccgcagagatcgagctcgagtacaccgaaatcgttgacgggcgcgtgaaaggcaccggagagaccctccgccttgctgcggatcaggtgatgaaagccatcggtcagacgctcgaaggccagccggatgcactggcgcttgagggcggcaagatcaaagtctccgagacgggcaaaacctccgtcgccggggtctgggccgggggcgactgtgcctctggcggcgatgatctcacggtcactgccgttgccgagggtcgcgatgcggccgaagatatccacgcaagcctgatgggctgaagccgctatgcgccgctcccccaggtggggcggcttgcatagttagcaaatagggagagatcaaatggctgatcttacaacagaattcctcggtatcaaatcgccgaatcctttctggctggcctccgcgccgcccaccgacaaagaatataacgtgcgccgcgcctttgaggcgggctggggcggtgtggtctggaagaccctcggcgccgaagggccaccggttgtcaacgtgaacgggccgcggtatggcgcgatctggggggcggaccgccgtcttctggggctcaacaacatcgaactgatcacggatcgcccgctggatgtgaacctcgaggagatgacccgcgtcaaaaaggactacccggatcgcgcgctgattgcgtcgatcatggtgccctgtgaagaggcggcttggaaagcgatcctgccgcgtgtggcggaaacaggatgtgacgggatcgagctcaactttggctgcccgcatgggatggccgagcgcggcatgggttctgctgtggggcaggttccggaatacattcagatggtcaccgaatggtgcaaacagtattatgacaagccggtgatcgtgaagctcacgcccaatatcaccgacattcgtcatccggcgcgggccgcgaaggccggcaatgccgatgctgtgtctctgatcaacaccatcaattcgatcacctcggtcaaccttgatgcaatgtcgcccgaaccgatgattggcggcaagggcacccatggcggctattgcggcccggcggtgaaaccgatcgccatgaatatggtggccgaaatttcccgcgatccgcaaaccgcaggtctgcctatttccgccattggcggcgtgacaacatggcgcgatgcggcggagttcatcgctcttggggctggcaatgtgcaggtttgcacggcggccatgacctatgggttcaaggtcgttgaagagatgatttcgggcctgtcggattggatggacgagaagggctattcctcgatcgaggacttccgtggcatggcggttccgaatgtgaccgactggcagtatctggacctcaactatgtgaccaaggccaagatctctcaggatgactgcatcaaatgcggacgttgctatgcggcctgcgaggatacctcgcatcaggcgattgagatgtcggcggatcggacctttaccgtgaaggacgacgaatgcgtggcgtgtaacctgtgcgtcaacgtctgtccggttgaaggctgtatcaccatggaagaggttgccgtgggcgccattgatgaacgcaccggcaaggtggtgagcggcgaatatggcaactggacccagcaccctaataatccgtctgcaacggctgcggaataaacaaaaaagggcgggggcgctcccgcccgttgcggatgccggtctgaaaccggcacccgctccccttgggccaagcgccgcgcgttgcgcggcgctctatcgtttcaaccggatcaacaggcctgaggccagcggagtgaatttctggggggggcaatgggggcattattgacctgagaggccgacgtaagtgacttgcgcaggcagatctatctcgggaggtggtgccagttcgaggcacaggatctctgcacccagccgtcttctggccagggcgcgggggatcggatcagggcggggtcaacatcctgcgatagagcgtgtcgagaaactccggtgcggcctcaaacggatcttcgggggtcatcagcgcctgcacctggacctcgaaatcggcgtagtgttgcgtgagcgaccagattgaaaacagcagatggcgcgggtgaaccggggcgatcttgccggcgtccatccagttctggaaaatcagttcggtcttgtccaccagcgcacgcaggtcggtcgaaagcgtgtcgatcatgcgcggtgcgccttgcacgatctcattggcaaagagacggctttcgcgcggcatgctctgactcatcagcaatttgcgctgcacatagccgaggatttcctccatcggttcgccatccgggtcgatttcatgcaagggcgccagccaatcgtcaagaagctttgacaaaagctctgtaaagatcgcttcttttgaggggtaataatagagcagattgggctttgaaagaccggcggcggtggccacctgatctaccgtggagccacgaaacccatgttgggaaaacacttccagagcggcctctaagatattggcacggtttcgtttttgaattctcgtggggctgcggtctgaggccatatcgtgccgattctttctcttgctgtgagaggtcgcgaagctgcttgaaaattgctcatatcataagcagccaaaatcttatcctgaaatcaggacgcgcaatttcttgactgagtctgatctggtgatagcgtgagtttgaccagttggtcaaatgtgcgcgccttcaaggctccgacattggccagcggcagaaaaaagagccactgacccgggcggagccaaccgcgcgtgaccttgccccgctcttcgcgggcagggcggactacagggaaggaagcaaagagacatgacggcgcttggacagaatctgaaaatcaatggcgatcggctgtgggacagtctgatggatatggccaagattggccccggtgtggccggtggcaacaatcgccagacgctcaccgatgaggacgccgaaggccgcgccctgtttcagtcgtggtgtgaagcggcgggcatgaccatggggctcgactccatgggcaatatgtttgcaacccgcccgggtgaagatcccgaggcattgccggtctacatgggatcgcatctcgacacccagccgacgggcggcaaatacgatggcgttctaggggtgcttggcggtcttgaggtcgtgcggaccatgaatgacctcggcatcaagaccaagcacccgatcgtggtgaccaactggaccaatgaggaaggcacgcggtttgctccggctatgctggcgtcgggcgtgtttgccggcaaacatacgcaagactgggcctatgggcgcgaggatgctgaaggcaagacctttggcgacgagctgaagcgcatcggctgggttggcgatgaagaggtcggcgcccgcaagatgcacgccatgtttgagctgcacatcgagcagggtccgattcttgaggctgagaagaaagacattggcgtggtgacacacggtcaggggctctggtggttgcaatgtaccgtgaccggcaaggatgcgcacactggctcgaccccgatgaatatgcgggtgaacgccgggctcggcatggcgcggatgacggaagcggcgcatcagatcgccatggcgcatcagccgcatgcagtgggcgcagtggggcattgcgatgtcttccccaactcgcgcaatgtgatcccgggcaaggtggtgttcaccgtggatttccgctctcccgaccttgaaaagctgacatcgatgcgcacgcaatacgaagccaaagcaaaggaaatcgcggcggagctcggtctcggtctggagatcgagccggtggggcatttcgacccggtgacctttgatgagagctgcgtgagtgcggttcggggcgcggcagagcgtttgggctatagccacatggatatcgtctctggcgcggggcatgatgcctgctggatcaatgatgtggcacccaccgcgatgatcatgtgtccttgcgtggacggtctgagccataatgaggcggaagagatttcgaaggactgggccgcggccggcacggatgtgatgctgcatgcggtgcttgagacggctgagatcgtcgcctgacaacaagagggggctctgcccccgtcgcggttcccgcgactcccccgggatatttggagttagaagaaactctgccgggagctcaataacaaaacggcgcaaaagtcgccggaccacagggagtttgatatgacgacagtcatcaagaacggcaccattgtgaccgcggatctaacctataaggcggatgtcctgatcgagggcggcgtcatcaccgaaatcggcccggatctgaagggcgatgaggtgctggatgccagcggttgctatgtcatgcctggcgggattgatccgcatacccatctggagatgccgttcatgggcacctattcttcggatgattttgaaagtggcacccgtgccgggcttgcgggcgggaccaccatggtggtcgattttgcgcttccgcagccgggtgagagcctgctcgatgcgctcaagcgctgggacaacaagtcgactcgcgccaattgtgactattccttccatatggcggtgacctggtggggcgagcaggtctttgatgagatgaagaccgtcatcgagacccggggcatcaacaccttcaagcatttcatggcctacaagggcgccttgatggtgaatgatgatgagctttatgcgtcatttcagcgtcttgcggagttgggtggcatcgccatggtgcatgccgagaacggcgatgtggtggcggagttgagtgccaagcttttggccgagggcaataccggccccgaagcgcatgcttattcgcgcccgccgcaggtggaaggcgaagccaccaaccgggcggtcatgattgcggatatggccggtgtgccgctctatgtggtgcacacctcctgtgaagagagccacgaggccattcgtcgggcgcgcatgcttggcaagcgggtctggggcgagccgctcatccagcatctgacactggatgagagcgagtatttcaaccccgattgggatcacgctgcgcggcgcgtgatgtcgccaccgtttcgcaacaaacagcatcaggacagcctctgggcggggcttcagtccgggtccctgtcggtggtcgcgaccgatcactgcgcgttctcgaccgagcagaaaagatacggcgtgggcgatttcaccaagatccccaacggcacgggcgggcttgaggaccggatgccgatgctctggacgcatggtgtcgaaactggccgcctgacgcccaatgagtttgtcgcggtgacctcgaccaatattgccaagatcctgaactgctatcccaagaagggggctgtgcttgtgggggcggatgcagatctggtggtctgggatcccaagaaaaccaagacgatctctgccgagagccagcaatctgccattgattacaacgtgttcgagggcaaagaggtgaagggcctgccgcgctacaccctgacccgtggacaggtcgccgtgatggacggtgagatcaagacccaggaaggtcacggcaaatttgtggagcgcgcgcccaacaccgtggtgaacaaggcgctcagcacctggaaagagctgaccgcgccgcgcccggttgagcgcagcggcattcccgccactggcgtctaaacgcatgaaaacgggggcctctgcgcccccgtttgtttgatcaaggctatgaaatgaatatgcaaatgacctcagaggtagaacaagccatcgatcgggagccaggggcggctgtgatacaagcacgcgatctggaccttgtgtttggatcaggcgacacatccgtacacgcgctgaaggacatcaatctgaccatcaataagggggatttcgtctcctttattgggccatcgggctgcggcaagaccacgtttctgcgctgtatcgcgtctctggagacgccgacaggcggaagcctcacggtgaacgggatgacgccggaagaggcgcgcaagcagcgtgcctatggctatgtgtttcaggcggcggggctttatccgtggcgcacgatcgccaagaacatcaagcttccgcttgaaatcatgggatattccaaagcggaacaggacaagcgcgtggccgaggtgctggagcttgtggagcttgcgggctttggtggaaaatttccgtggcagctgtcgggggggatgcagcagcgcgcctcgattgcgcgtgcgctggcgtttgatgcggatctgttgctgatggatgaaccctttggcgcgcttgacgaaatcgtgcgcgaccacctcaacgaacagctcctgaagctctgggcgcgcaccaacaagaccatcggttttgtgacccattcgatccccgaagcggtgtatctgtcgaccaagatcgtcgtgatgtcgccccgtccgggtcgtatccacgaggtgatcgagagcaccctgcccaaggaacgcccgctcgatattcgcgacacgccggagttcatcgagatttcgcatcgcgtgcgtgaggggcttcgtgcggggcatgctcatgactgaggattttgcaatggagggcggcgtatgaagacgtttatggccgtcctaaccgtggtcgcggggattattggcctctggtatcttgcctgcgtgccgatgaacatcaagggggtgctggacgccgctgagcgggcaggggagcaggtggagcctgcaaccgcgcgtgagcgtcgagacgcttcggcacttggacttgtggttcagaacagctttgcgatttcgcgtgcatggtcggtggagcgcccgcgcttgccggcgccgcatcaggtcgccacagagctctgggacaccacggtgatgaagaagatcacctccaaacgcagcctgatctatcatgggcaagtgacgctctccgcgacgcttcttggatttgcgatcggcacagggcttggcatcctgcttgcggtcgggatcgtgcattccagagtcatggacatgtcggtgatgccctgggccatcgtgagccagaccattccgatcatcgcgctggcgccaatgatcatcgtcgtcttgtattccattggcgtacaagggcttttgcccaaggcgatcatcgccgcctacctcagtttctttcctgtggtggtcggtatggtcaaaggcttgcgcagcccggatcacatgcagcttgatctgatgaagacctacaacgcctcgcaggggcaggtgttctggaagctgcgtctgccctcgtcgatgccttatctctttgcctcgctcaagatcggcattgcggcctcgctcgtgggggccatcgttggggaattgccgactggtgcggtcgcagggcttggcgcgcggcttctggcaggaagctactacggtcagacggtgcagatctggtcggcgctttttgcagcggccatcttggctgcggctctggtggcgctcctcggagtactcgagcgcatgctgcttgggcgtatgggggtgaaaccatgagtggaaaacgtctgatggcaacccggccccaaactcctctggaggtgcgctgatgtatttggttttcttagctgcagtagtctggtgcgcggggtggtggatcaacactcgccttgccaatgggccaaaggcggatagccgtgcggtgggcctcctggtgccggcgatctttggggtgacaatcctcatcgtctgggagctgctggtgcgcggccttgaggtcccgctggtgatcttgcccgcgccctcgttgattgccgagcgatttgcggcgagcctgccgatcctttgggcagacttcagccagaccatcctcaaaggggcgctgggtggctatgtgatcggctgtggcgcggcgtttctgaccgccattttggtggatcgcagtgatttcctgcgtcgcgggctgttgccggtggggaatttcgtcgcggcgctgccgattgttggcaccgcgccgatcctggtgatgtggtttggctttgactggcagtccaaggcggccgtggtcgtggtgatggtgttcttcccgatgctggtgaacaccgtggccgggctgcgcgaaaccgaccagatgcaacgcgatctgatgcgcacctatgccgcgtcctattggcagagcctcatcaaactgcgcttgcctgcggccttgccgtttgtcttcaatggtctcaagatctcgacaaccctggcgctgatcggggcaatcgtggcggagttctttggctcgccaacggttgggatggggttccggatctccacctcggtcgggcagcttgcgcttgatatggtgtgggccgagatcgttgtcgctgcgctcgcaggctcgctcttttatgggctcgtggctctcttggagaagtcactaaccttctggcacccgtcccaacggggctgacaaaaacgcgtgtccctgcgcgacgtgggggcacatcatcatttgggcgcaaggtgctgtatagagggataaatccccgccatgcccggtgcccaagtcttgtgcgaaaccaagggatcgatcgtcaattaatggcaaatcttttgcgtgtcgatctcaactcgcgcatgatttcatcataaccaacagggagttcaatctgatgaaaaacgtgctaacagccgccgccatggcactgatggcaacctctgctgcgcaggccgcagatgaggtgaagctgcaactgaaatgggtcacccaggcgcagtttgcaggctactatgtggcgctggacaaagggttttacggggaagaagagctggatgtgaccattcttcccggtggccccgacatcgcgcccacgcaggtgatcgcagggggcggcgcggatgtgaccgtggaatggatgcccgcagctctggctgcgcgggaaaaggggctgccgctggtcaacattgcccagccgttcaaatcttctggcatgatgctcacctgctggaaagacaccggcatctctgcacccaaggatctcgcggatcgcactcttggggtctggttcttcggcaatgagttccccttcatgagctggatgggcaagctcggtatctcgacagagggcaagggtcccgaaggcgtagaggttttgaaacagggctttaacgtcgatcctctgctgcagcggcaggccgattgcatctccaccatgacctataacgaatattggcaggtgattgatgcgggggtctcggctgatgagcttgtgaccttcaaatacgaggaccaaggcgtcgcaacgctcgaggatggcctctatgtgctcgaggacaacctctccgatccggccttcgtcgacaaaatggagcgctttgtccgagcgtctatgaagggttggaaatacgccgaagagaacccggaggaggccgcagaaatcgtgctcgacaatgatgcctctggtgcccagaccgaaacccaccaaaagcggatgatgggcgagattgccaaactcacttccggcagcaatggcgcgcttgacgtggcagactacgagcgcacggtgcagaccctgctgagcggcggctctgacccggtcatcaccaaggcgcctgaaggggcgtggacccatgcgatcaccgatgcggcgctgaactgatttcgcaccacggtaatgccatcgtaaattaactggatacccagccgaggcttcggctgggtatcgtcaattttaagagaaagtaacattctgttaagggcttgcacgcttcacttgtgcggggatctgctccccgttgtacgggggagagaatgtcccagttaacaagtgagttgggtttttgtggggcggcgtcgccaaacgtgcgccgctccgcagttctcgaacgcgtctgtctcaaggcgcgccttcggacacggatcggcggtgcgccagaggctttggtgctttattacgcagccagtgttccagcacatgtaaacggcgatctacgcgggtcttatgctgtcacaaacctgagggtctgtccgtcgggctgcctcagaaccgaggacgtcctgggcgcactcgcgcatggattttcacgcgttttcatcgagttgtcgcccgatattcgtctaatacatcgacagctcgaccttgtcgaagatattgctgcctgcgctggattggatgggacggttgctctgttccactctgaaaacgcgctttcggtcctgctggatgaccccatcaaagatgacgcagatgccgcgataccacctgagcctcgcgcagagacggaagcaccctcagtggcggggtatgtgagcctcacggacggatgtacgctgtgccaacactgtgtatggtcctgtcccacggatgcgatgcacctgggcgatacgggcaacacgctggagatccgcgatcaggcctgcacgggctgcggtctctgcgcaagcgcctgtcccgagcgggtgctgtcaatcctaccggttgctacagtcctgtgcagcgcctgagggcgcaccggggtatctgagcctgaggagctaccgggcgctctgttgaaaagtcagtcggaaaaacgaccgtatttgccctgatggaataccaaaccgggtcccagatcggcgcggcggctgacgttcaggacttcacccaccaaaatggtgtgatcgccacctgggtgggcggcgtgatgggcgcagtccaggcggaccattgcgtcgtcgagaacgggctgattttgcgtgttccggctccaggggtggacgtcaaaggcctcgccatggcgggcaaaatgcagcgctgcatccatgtgatcttcggccatcacatgaatcgagaagtgtttggcccccacaaatgggtcatgccgcttcgagtgtacggccggacaccacagcaccagcggcggcgtcagcgagacagaggtgaagctgttgacggtcatcgcaagcggtccgcgctcagtctgtgttgtgaccacgaccacaccggttgcaaaacaccccaatgccgcacgcatctctgcctgagtgtcggggccgggagtgaagctggtaagggtcatggggcaggggatccgttgctgtcatcaatgctgcgcgtgcctctgagggatagcgggcctcgcccttatttcaacctctgcccttggatgcaaaagaaaataaatcagatgcctccgaccctcggggcggaggcatctgatgctctcgcgcagagggcgaccttagtgcaggatcgtttccaccacagaggatatctgcgtcgcaacgctgctgatttccgccattgcatccacggatttcagcacgccggcctcttggtaataggcgatcagcggtgcggtctgcgcatgataggcctcaagccggctggccactgtctctgcccgatcatcagcgcgccgcgtgagggtttcaccgccgcatttggcgcagacttcacccggcataggcggcttgaaggtgtcgtgatagccttctccgcaatccgcgcaggtggagcgcccggagatccgtgtcaccatcgcgctgtcattcacttcgaggctgattgctgcgttgatccgctgtccggtcgaggccagcagcccatccagcgctttggcctgcacggttgtgcgcgggaagccgtcgaggatgaccccgttgcggcaatctgcgtcgttcatccggtccttgaggatggcgatgacgatctcgtcagagaccagaccgcccgcatccatcaccgccttggcctgtttgcccgcatcggtgcccgcagccacggccgcacgcagaagatccccggtggaaagctgcacaaggccgtatttttcctgaagcatccgcgcctgcgtgcctttgccagcccccggagggcccagcaggatcagtaccgcggggcgggtcataacatctgtggtcatggtcgcttaacccttgttggcacggttggagatcagatcatcgacgaccgaaggatccgcgagggtcgaggtgtcgccgaggctgccaaaatcattctccgcaattttacgcaggatgcggcgcatgatcttgcccgaacgtgtcttcggcaggccaggcgcccattggattacatcaggcgatgcaatggggccaatctcggtgcgcacccactgacgcagctccttcaggagctcgtcagaaggctcgcgatcattcatcagggtgacatagcagtagatgccctggcccttgatctcatgcgggtagcccacaacagcggcttcggccacggcggcatgtgcgacaagcgcgctttccacctcggcggtgcccatgcggtgaccagagacgttgatcacatcgtccacgcgcccggtgatccaatagtcgccgtcggcatcgcggcggcacccatcacccgtgaaataatagcctttgtaatcagagaagtaggtcttctcgaaacgttcgtgatcgccccagactgtacgcatctggcccggccagctgtccttgatacagagcacgccctcaacgccgttgccgtcgatttcagcgcccgactgcggatcgaggacgacaggctccacgccaaagaagggcttcatcgcagcacccggtttggtggcgtgggcgccaggcagcggggtcatcaggtgtccgccggtctcagtctgccaccaggtatcgacgatcgggcatttgctcttgccgaccacatcattgtaccagttccaggcctccgggttgatgggctcgcccactgtgccgaggagcttcaggtcggagaggtcgtatttctcgacaaattccgtcccttgccccatcagggcgcggatcgccgtcggtgccgtgtagaactggttgaccttgtgcttttcgcagaccgcccagaaccggcccgcatcggggtaggtgggcacgccctcaaacatcaatgtggtggcgccattggcgagggggccatacacgatatagctatggcccgtgacccagcccacatcggccgtacaccagtagatgtcgccatcgtggtaatcaaacgtcacctcatgggtgagtgcggcataggtgaggtagccaccggtggtgtgtacaacgcccttgggctgcccggtcgaaccggaggtgtagagaatgaacagcggatcctctgcgtccattgcggcgggtttgcagtagtcattcgcctccagcgccatctcgttatagtcgtggtcgcgaccgtcgatccatgtggtctgaccgccggtgcggcgcaccacgaggcacttcacgctttccttgcagtgcagcagggcggcgtcggcgttcgacttcagaggcgtcttgcgccctccgcgcggggcctcgtcggcggtgatcacaaccttggcgtcgcagccattaatccgcgccgccagggcgtccggtgaaaaccctgcaaaaacaattgagtggatcgcaccgatgcgcgcgcaggccagcatggcataggcggcttcggggatcatgggcaggtagatcaccactcggtcgcctttgccgacacccatgctctcgaggatgttggccatgcggcaggttctgaggtgcagctccttgtaggagatgtgcttggcctcatcggatggatcatcaggctcccagatgatcgcggtctgatcgccacgggtctccagatggcggtcgatgcagttggctgcgacgttcagctgaccgtcctcgaaccatttgatgtccacgttgccaaaatcataggacacattcttgaccttggtgaacggcttgatccagtcgatgcgttcagcctgctctgcccagaacttctctgggttctcaagggattgcgcgtacatctcgtcgtattttgccgcattgacatgggcgtttttgacgatgtcctcagacggtgggtaaactgcgctctcgggcgtggtcatggaatgtcctccctccaaaattctcttgggcgcgatctccacatggaagtgcgccaagagtcaaaccttctccaaccttgggcgtgataataagcgaagttgaaaagatgtgaataaacatcgttaaaataagggcttgcttgtaaatctttttccgctgcccgctgaaatactgtaaatttacggtagaaattgacgatttttacatggatagacagaatttttcctgtcaatcgctccagtgtagacgccattggcgtcgccggtatcagttgggattgtgttcgagtgggctgcggcgtttgcgcgcagaatgtggccctgtggcggcctgccgcgactgggcaccgtttcaggcgctttgtttcagacgggtggcgcgcagtctctctcgcaactctgcggtgctgatttcatcgcgtgccagcggagcatagacctgctcggtcgccattctcgcgagtttggggggcaacccgtgcaaatagcgcaaccggggcagcaaagcggcgagctttgccacggagcgaggcgagagcccgcgcaaagaccaggggccggggaaaaagctctccgttgcgacgccgccggaaaacaagacctggtgccgctcaagcaggacatgaacataggtgacgccgcctagagggcaatcaacactgacctgatccggcgctacctgaaggagttgattggcgcgcaggaaacgctcggtccgatcctgtgggtcggcgaacacgaaccggtgctgacgcgacaccgtcatgggctgcgccagttgaaggctcccgcctgggtgcagtgtgatgggcctcagccgcggattggacatgagtgcgctatggggaacatgggttgttccaatccagatcacgggttggcagccctcatcagccgtctgcatcagatcgccgacccggagtgtctcaaccggacgtggccccgtcgcagtgtcgatcagtgtgcccgtggtgaaacagggaatgcccgcagaatagagattggccggggcagacataaaggtcggtggcacgccaaggagcaccagctgctcgccatccgggaacgtcagcaccgcattgccgctgccatcgtcgctgacgacaacatcgtttcgtgtgacgctgccgccaggtcctgtaccgcccgagagattggacacatcgagctggtcgttgaagcgcccatcgccatccagatcgccggtaccaaaatcggtgatggtgtcgcgcccgccgctggtggtaaggacaaagaggtcctccccaccggcgcttgtcatcacgtcatcacccaggcccccggtgatggtgtcatggccgatgccgctggagagcgtgtcattgccgctggagccgatgatggtgtcatccccggtccctgcatccagagatacgccggtggcagcagcgctggcatcaaaaaaatcagcctgattggtcagggtgatctgctcgatgtcgctgaaggtgatcgtatccgacccgctgacgatgtccccggcctcatcccccgaataggtaaccgaaaccggcccagacaggttggacgcgtcaatgtgatcgccttcacccgcacccccatcgatcgtgtcattcccggagtgatcttcgaggataaaagtgtcgtcgccttcgcccccgatgagctgatcgttgtcgcttgcagtgacagtcggaacctcggtggtgaagacctcgctggcagtaagcggcgtggagccgtcgtgatagatcacaaagctctgcgtattgccgttcgcatatgtaattgtaatgtcggaataataatctgtcggcgaggacgcgttggtcatcgaaatcgaagcataggcctcgggcagtacgatccggtcattgccgacgtcaaagtcgccaatggtcagggtgccggtgttgttggtggttccgacaaccacatagtcagcctcgccatcgccagagcccgactcggtgggcgtattgttcatgcggatgacggcgttgctgcctgtttccgcattccagtgatagaagtcctgaccggttgtgccgtgataattgtcgccgttgtacacctgcacataggtcggcgccgcagcgtctgaatcgctgccgctgtagatcacatcatcgccagcgccgccgacaatcgtgtcgtctccctcgcctccgcgaatggtgtcattgccgtcgccagcaaggatgtagtcatcctgattggtgatgtcctgcccatcggcgtcggtatagccgacgtccatgttgtccgcgccggaggtgccgtcgatggaatagacgtccggtgtgccatctacaaccgaggtcgagaaatgacccggggccgggccactgtcaaagcttgtggtctcgtattgggtggcgtcattggtatcgcgtgagccttcgagttcgtagacatttccattgccatcggtcaggccgacgctgttgccgagcgtgtcgccatcaccatactggatgtcctcatagataaactcgagatcaaagttgccgccgcctgtatcggtcagcacaacctgaaaggagttcgtgccggcgcccgaagagggggcaacatcgagccaggtgatcgtgaccgtgccgttgaccgtgtcgagatcccacaggatgtcgccgccctggctgagatccatatcggtccacagcggtgcgatcagtgggccttggttaaaaccttcgaggccctcggggttgtaggtggtgctgtcccaatcaaaaccaatgacaccgttggtgccgacgttgaacccggtatagttctggccaaagagcgtgatccctccagggccgaacaccgaggtgatatcaacataaacgctgccatcatcgagggtgccgctgtccggcccattcgtgacaaagctgttttcaccataccccgtcgcaccgccgaggcctgagttcatcgttgccatttactcttccagcccctgcaagaggggcagcttcttgttaccgggccaattgaacagggctcatcatcgttttatgcgaaaattcttaagttcctgttgagggtgaatgacgggcgaaaagtgaaaacgccatcaaatatgggactatctcttcggggtcagccactgatgcgtctgcagaggttgagtaaatttcaaatatgcaaacctagggcagcgcgctgaagcgaggtgctgcgcgctcatgtggtgcgtctcgcatgatccggttgttccgtctgcggcgcctttttcgtctttcagatcgactgcttttggcgggcgcgcatgcacaatctgcgaatttgcgcgtggcaatgtcggtcaggtcgcaggcattgccacgcatcgcagagccttttgtgaaagacgcgcgccgcagtgtcgcggatcatcaagactgatgcgcgccctgatcttggcgttgaccagaagagggagcggcgtcccagtcttgacgcgagctaattgcggacgttttggcctcaggagcgaggccgtagttcggggttctcaactccgggttaatgcggaggctcaagtcgcccaatcttggccagagccggaagatccagccctaaagcaataagggaggcagcagtttatgtgcactccctcttgggggtcttatgtcggggcgggaaccttactggtccatccacaccttcgatgggaaaggcgcggtggcatgagtgccgaccgcgcccttagatcggaatggcttgggatgagtcccaaccgggggggactctagaggactaggtgccggtgcgcagttccagttcaggttccacggttggcggcggcgtgttcgggatcggcgcgacatgttttgcgatcttgatttcgccctcggatacaaaattcgcgatctctttcgacatcaccgaggcatcgctggcgagggtctggcttgcgccagtggtctcttccaccatagcgacgttgttttgtgtcacctcatcaagatgaccgatgccgctgttgatttcgctgagcgttacggcttgttcctcggctccgcgtgcgatgacgctgacgttctcagaaatcgagttcacgctgctgatgatcgcctcgagttctgtgccggtgcggcccaccagggtcacgccgtcagagacatgggtggcgctttgatcgatcaagcctttgatttcaccagcggcatccgcagagcgaagcgctagatttcggacctcggaggcaaccacggcaaatccgcgccccgcttcgcctgcgcgcgcagcttcgacgccagcgttcaaggccagcaggttggtctgaaaggcgatgtcgtcgatcacggagatgatctttgaaatgctttgcgaggattcttcgatcttggacattgcttttacagcgtcactgacgacctggccgcttttctcagcggtcacgcgggcctggcgaacattgtcctcgacttcgcgtgcgccatccgccgaagagcggacggttgctgtcaactcctcgactgcggcggctgtttcctccagtgtcgccgcctgattttccgtgcgttgcgacagttcagaggaggagtcattcaactgacccgccgtgcgtgtgacgccatctgccacttcgcgcaccgtgcgaatggtgttttgcagagagctgacagcctcgttataggctgtggagagacgcccgatgtcatcgatgtcggagggggcgcatcgataggtcaaatcaccgtttctcagttgttccagcgcggcggcaattccaagaatttccattcggcgcttggtgatgttggacgcgattttcacgatccggtcgacggtcccatcttcattgaagaacggcgcgtaggttgcttgaatccaaacaacttctccgtccttgcgcagcctcggaaactgatccgtcagcggattgcccgcagccagatcgcgccacatctgcttgtaggcgtcttttctcacaaaactcggatagacaaacatgctgtggtgttggccctcgatttcctcaagcgtgtagcccagcgtgtccaaaaagaccttgtttgcgcgaatgatggtcccatcgaccttgaactcgatgacggcctgggtgttttcgatcatcgcgcgcagcttctgatcgtcattcaggctggaggacgcagcggttttggacttcttaaaaagcatgtaggagttccatcgcaggagtggatcgacgccgataccgctcggcgaaacttcccgccagattagcgttgaattcctaacataatccttccgccaatgcggtagcgcctcttaccgtcatttcagcgcaaagcgcgatccccgtgatcttctggtgcacaatagagcctcgtatcacacgatctgaaacccgtcggcgtggcgtagtttttctcattctagattaactgcaccttaaactctgggctttattaaaactttcacgagccacgcgacgtggaacttttgacgaggaaacggcctggaagatgcggttatcatctcacaacctccctgatacgactgcgccgtcgcgcccacatgtgaccgtgttttgtgcggtctggcacaaacagccaaacaagctggagttgctgaaatcccattgggacaatctaaaacggcaaagcatcccggtagagccttgttatattttcgacaatggggacaccgcgcccgaatggctggccgcaccgtggcactccttctccgagcctctgaccatctacgaggcatgggcagcaggggtggcgcttgcgcgcacccggttcgtcatgaacctcaacatggatgaccggctgagcacggatgcggctgaaatgatgctgcgcgggcttttgcagacggatacagccttgattggcggtgaatggatcatccagttcgaccacgcgtttcagacggaggtctttgggtcgagcgatcctaaacaaacctgttttgagcccgcttggccccccgctccgattgagggcgataaacgtttgcgcctcggaagcggcacgggcgagcggggtacgcttgggcctgcaacgctttgggatcttgagaaaactcagcgctggtatccaactcatttcggcaatcgcgacccgatcctgtcgattggcgatgcgattttctggcagcatctgcacaagaaaaaactgcgcaccgcgcggctgcctctggttattgggcggtatttttcctcaccggatgcgcaggccgagttccgcccgcacaatgacgaggaaaacctgcgcacccatggtgtgcatgaggtgtcttttgcccagagcataacagccacacggaacgcgatgccccaaccggcaccgcaaggcgcgtccccgtttccaaaatcgcgcaacgcaatagaaaacgaaagccaggctctcgcgctaaaatatcttggtcttctgggccatggcactccggccgcgtcacatccccgagcatgagccagccccttcgcatatttctgaccggcagtggcggcatccttggcaggcatgtttcaaccgcgctcctggctcatgcgccaggcgcgcaggttttgcgcaatactgcggatctcacggatttggccgcgaccacgcgggtggtgcagagggcaggcccgcttgatctggtgatccatctcgctgctttggttcccgtggacgaggtctgcgctgatccggcgcgcggctatgctgtcaacgcgggcggaacgatcaatctactcgccgctttggctgctgcagaagtagggcaggcgacacctgcgcgcctgctgcattgctcgtccggtcatgtctacgccgcccaggaccgccccatctctgaggaggatccaacagatccggtctcggtctatggaaagaccaaactgatgggagaacaggccgctcgcgacatctgcgcccaagtcgggcgcgctctctgcgtggcgcgtctattctcgatccatgatcctgcgcaggagggaaactacctgcgcccatcactggaacgtcgccttgcaaaagccagcccagaaacggaattcgaactatatggtgctggcagcttgcgcgatttcctcaccgctgaggcggctgcgcagcagcttgtgcgcctggctatttcttcctttgaaggggtggtgaacctcggttccggtcgcgcccagactgtcgccgagttcgcccagagctttgcgccttttcctctcaaaatcaaagccatgggagccgataacaatctggttcccgacgtctccctcctgcatgacatccttggagaagcaaatgactgagtccgtatccattgtcatcccgacgtttaaccgcgcagagatgctccccaaggcgatcgacagcgccttggcgcagacccatagctgcgaggtgattgtggtcgaccatgggtccaccgacagcacccccgaggtggcagcctcttatggcgacaagatcacctatgtgcggcgcgatcgcgattttggaccacatttctgctggttggatggcattttgcatgcaaacagcacctatgttcatctgcaatatgacgacgattggatcgccgagacctttatcgaaaagtgcctgagtgtcatgggtgaggatgtgggctttgccttcagtggggccgaagtgatcgacgataagagcggtcgccagatgatgacgcagtttctggaatggctgccccagaccggcactttcgacaatcatctcgccgaggagaaaatcgtcggctcgctgatttcgccgggtgcggcgctctttcgtaagcaggtgctgatcgatgcgctttatcagggccgcctgccactgcagaccagtgagtatcatggggtggggccagatatttttgcctcactcctgtcgatgttgcgctacccgcgtgtcggatttgtcaaggagccccttgccagtttccgcgcccatgacggcagcatcaccatcgatgcattcaaggatgcacaaaagaaacgcgacattgcggccgcctacaacgaggtgcgcgcctactatgtcgaattgaaagccatgcagatggtgagggccgcgcagtgaccacctccaaaacagttaaaccggttcttctggcggaagagacgatctctcaggacgacctcaagatcacgacagaatggatgctggctggcaatcgcctgacaaaggccgaagtcaccagccagttcgaggccagctttgccgagtggatgggttgcaattacgcggtttttgtaaactcggggtcctcggcgaacctgctgatgatctatgcagccaaagaggccggtcgcctgcgcaacaacaaggtgatcgcacccggcgttagctgggtgacgaccgtctcgcccctgatgcaactgggatttgatgtgcgtctgtgtgactgcgaccccctgaacctcgggcttgatctcaaccacctggaggagctctgccgaacagaggcgccctcgatgctgctgctggtgcatgtgcttgggcacgccaaccacctgcgcgagatcaaggagatctgcgcgcgctatgatgtgatccttctggaggacagctgcgaggcgcttgggtcgacctttgaggggcagaaactcggctgtcacggtcttgcggggagtttctcgttttattacgggcatcacatctccaccatcgaaggtggcatggtggtaaccgacgatcaggaactgcatcaggtcatgctgtcgctgcgctcgcacgggtggagccgggatcttgcgccggggcgccaggcggacctacagcgcacgcataatgtggatgagttccgcaatctctacacgttctattatgcgggcttcaatctgcgctcgaccgacctgcaggcctacatcgggttgcagcagctcaaaaagctcgatgaaatctgccgcattcgggcggagaatttcgagacctacgcgcaaggcctgcctgggtttttcaagcagcagagcgagacagaactgctgtcgtcgtttgcctatggaacgctggtggaaaaccgaatggaggtcgcgcgtgcgctcaaggccgagtcgattgaatgtcgccctctgatctgtggcaatatcgcccgccacccgttctgggtacgggtctatggtgatcaggttctgccaaatgccgacctgattcatgattttggcatctaccttcccaatcaccacaacctcaacgcagccgacattgatcgcgtcgctgagtgtttcaactctgtggcctgcccaatggactcaaacctgagacaaagcgcctgaacccgcgcctgaaccttgagcctgcacgccccaaaagcgcgtgcccgaatacacgaggataacatgaccaaacgtgcgctcatcaccggggtcaccggtcaagacggctcttacctggcagagttcctgctggagaagggctatgaggtgcatggcattaagcgccgcgcctcatccttcaacaccagccgtatcgaccatatctatcaggatccgcacacggatcgggcgcgcttcaagctgcattatggagatctggccgacacttccaacctgacgcggatcttgcgcgaggtcgaaccggatgaggtgtataacctcggtgcgcaatctcatgtcgcggtgtcttttgaggctccggaatacacggcagatgtggatgccattggcacactgcgcctcttggaggcgatccgtttcctcggtcttgagcagaagacccggttttatcaggcctcgacatctgagctctatggtctggtgcaggagacgccgcaacgcgaaacgactccgtttcacccccgctcgccctatgcggtggccaagatgtacgcctattggatcacggtgaactaccgcgaggcttatggcctttacgcttgtaacggcattctgttcaaccatgagagcccgcgccggggtgagacatttgtgacccgcaagatcacccgcggccttgccaatatcgcacaggggctcgagccctgcctttacatgggcaatatcgacagcctgcgggattggggtcatgccaaggactatgtgcgcatgcagtggatgatgctgcagcaagacacgcccgaggatttcgtgatcgccacgggcaagcaatcttccgtgcgggagttcatcatctggtcggcagcggaactcgggattgagctcgagttttccggcaagggcgtggacgaggtggcaactgtcaccgcgatcaacggtgatgccgcacccgcgctcagggtgggcgatattgtcatgcgtattgatccgcggtacttccgtccggccgaggtcgacacgctccttggagatccgacaaaggcgaaggaaaaactcggctgggtgccggagatcacggcgcaggagatgtgcgcggaaatgattgaggaagacctgaaaaccgcgcgccgtcatgcccttttgaaagaacatggctatgatctgccggtctgcatcggggagtaaaccctgccatgacatctgaacaggtgtttgatctacggggaaagcgcatttttgtggctggtcatcgtggaatggtcggcggtgcggtcttgcgacggctggccgaagaagactgtgaggtcgtgactgccggccgcgaggatctggatcttacgcggcaacaggcagtgatggagtggatggccgcaacccgtccggatgccatcatcatggctgcagcacgggtcgggggtatcaaggcgaacagcgactatcccgttgatttcctgttgcaaaaccttcagatcgaaaccaatcttgccgaggctgcacatgctgcagatgtccagcgtttcctgtttctgggctcttcctgcatctatccgaaattcgccccgcaacccattcccgaggcaagcctgctgactggcgcgctcgagccgagcaacgaatggtacgcggtggccaagatcgcaggcatcaagctgatgcaggcctatcgccagcaatacgggcgggattggatttcggcgatgcccaccaatctctatgggccgggggacaactatgatcttgagaccagtcatgtgctgcccgctctgttgcacaagttccatactgctcgtttgacgggggcggatcaggtcacgctctgggggtcgggcactccgctgcgcgagtttcttcattgcgacgatctggccgatgcgctggtgttcttgctgaaacactattcgggtgcggaccatgtcaatgttggctcgggcaaggaaatcagcattcgcgcgctcgccgaactcattgccgagatcgtgggtgtgagccccgagttggtttttgacagctcaaagccagatggaacgccgcgcaagctgatggacagcgcgcgtttggcggccatgggctggtctggcgcacgccccctgcgcgacgggatcgcagaaacctacgcggcgtttgtggcgcaactggacagcgttgaagcctgaactttgatactcttggctgcgcgacactgaccatgaggccgcgcgcagcccagttcctcgaggataattgggatcccccgcatcgctgtcagccaggatgccgctcatcaggagcagtctgttttgacggacgcgatgtatcagccttcgggggcacgtatttggggtcttgaaggctgccgatccatcagatcacacggtttttgtgaccgcggggcagggcgcaaccccggggcaatagacatctgccatatatgggaaacacctgggcaaagaacggtcaggaaaacaaaagccgccccaaagggcggccttgttactctcttgtatttcaagagattttggctccggcggtagggatcgaacctacgaccaattgattaacagtcaactgctctaccgctgagctacgccggagtgtgggcgctcgtatagcgctgggatttccgggcgtccagagcgaaaaaacaaaaaacggtgaaaaaaatcaatcggtacaggagaaacgcgttgaaaggctcagagcaccttcgggctgcgcgatattgcgttgtgtcagatccacgagatgggcaaatacgttgcgctctgcggccttaagaagcgcggcgggcgtctccttgtagatcgtggccgccagttccgagacggttctgggtgcgatccgaagttccgcgagaatcgcgcgctctcgctccaaccggtgcgcaatcagccagtcgagacgcgcatgcggggcgtcgatcggggcgccgtggccgggcaggaaacgggaccactgacgatcttgcagcttgcgacaggaggccatgaaatccgtaaggtccccatccgggggcgaaaccagagagcttgcccaccccatcacatgatcgcccgagaacaagatatcgccgagcgcaaagcacagatgattgccaaggtgccccggggtatgcagggcctcgatctgccaatccggaccggacagcgtctcgccatccttgaggacatgatcgcagctgaaggcatgatcgatcccttcgccaccacccgtgacgtcctcctgggcgagcgtttccatgatcgcactgcgcccggcgcccgcgggtccaaaagcatagatcgctgcgccggtttcctcttggagacgctttgcaagcggagaatgatcaaggtggctgtgggtcaccagaatggcgtcgatggattgaccagcgttcaggctcgacaggattgcctcaagatggggctctgagcctggcccggggtcaatcaccgccagattgcgcgtaccgatcagataggtgttggtcccgcgataggtcatcggcgaggggttgggcgccagaattcggcggatgccgggagcgatcatctctgcgaagccgggtttggggttgaacccatcggtgggttgcgatctgctcatgatgtgcctcatccttggggacgcagaattgtcccgctctaggcttagtcatgaaactctctgatctcaaacactatgtaccgcgccttcccagcgggatctacggccgggcggcgcttattctgttgatgccggtggtggctttacaactggtggtggcctttgtgttcattcgccgagaccttgaggacatcacgcagcaaatggcctacactgttgcgcgcgagctcaatgtcatcagcgatcagatcgccaccgcagaaagtcccgaagcggccctgagtgaccttcagccgatgttgcagcggctcaattttcagatgcgttttatctctgccgaggagcccacgccgcagaactccattccgtttgaggatctgtctggccgttttgtgcgcgactccatggtgggatacctgccgcagttccagtccatccggttcacgcgctcccacgccagctatatcatgatcgatacaaaatttggtctcgcggaggtgaagttcagccgccgtcgcgtgaccgtcgccgcaccacaccagttgatcgtgatcacggtgctgtttggctttatgcttgtggtgatcgccatggcctatatgcgcaaccaactgcgccccatcaaacggctcgcggatgcggccgaggcctttgggcgcgggcgggtgatcccctatcacccgcgtggggcaaccgaggtacgcgcggcgggggcggctttcaatgacatgcgcgcgcgcattgatcggcagatcgaacagcgcaccttgatgttgtcaggggtcagccacgacctgcgcacgcctttgacgcgcttgaaactgagcctctcgatgctggacgacgaggaggccgagccgatgttgcaggacgtgaaggagatggaagctatggtcgatgcctttctcgacttctcgcgcggtgtgactacaagcgcgatggaggaaaccgacccctgcaagctcgtggaggaagcggtcgagaactggacccgacagggcaagaccgtgcatctggtagagacggtcggcaatcgccgggtgccgctgcgggccgctgcggtgcgtcgtgcccttgacaatctgatttcaaacgcggtgcgctatggcacgcgcgcccgagtgtcggttgcagtgatgcagaaatcgctgcgcattcgggtggaggatgacggccctggtatccccgaagcattgcgcggggatgcgatgcgccccttcacgcggcttgatccggcgcggaatcaggatctgggcaccggtgtcgggctggggttggccattgtggctgatattgcccgcgcccatggtggaacactgcgccttggcaccagcgaagagctgggcgggcttcaggccgatattgtgatcgcgctctgagcggcctcaaccggcgctgtgacaagatttttggtacactcaagcaagtgcgatacgggcgacagagcagctgcgatcggggcaattgcgtcctggatggctcttggttcagggcctcgtggtgcagggtaggtgcagggtgtcgaagccagtggcgcagatgcgtggtgggagatcagagattcgaactctggaccaaagcgttatgagcgctctgctctaaccgctgagctaatctcccgccaagagccttatagaacccttgctgcggcctcgcaatccgttgcgaagaagaaaatcgagccgttgcatcccgctgacatctaacactcatttagtgattgatggccgaaacagccgacattcccaacagccgtttgatggcgggtaacggcggggcttaggcgccgacggccctgaggtgcggttttggctggcgattgcgaaaggcttcgaatgtggccacgacaccctcgatcaccaattcgcgtctgcgatcgacgccatggcgagaggggtagacggcaaacacatccttgtccggggcgtcccagtcgggcagcacacgttcatattcgcccgcgtccagcatttccttcacaaagaacagcggcatgcgggtatagccggtgccgttggtgaccgcatggcggatcagatcgggatcatcagccgtgaaccccacgcggatcggcgccagaacctgttcgccaccccggctgagggggaagaacccgttggtctgatcctcgtggtgctggatgtatttcaaccgcttcaggtcttcggggctttcggggcgccccatctgatcgaggtaggcaggcgtcgccaaaagcactgtctccatggttgcgatccgccgcccaaccccatccgtttcgccaagccgcccggtgcggatggcgagatcgtagttctcccgcaccacgtcgaccaacctgtcctcgacccgcaggatgatgttcagatcatcatggctctggtcgagctccaccaacatgtgcccaatcaggtgacggccaagaaagctgttcacgctgatgcgaaaatcgccggagaggctgtcttgtagctgatcgagctccgcggtcatgcggtcaaaattgccaagcaacctctgggcgtgagtgtagaccagctcgccagagcgcgtggcgcgcacgccttgggctgtgcgatgtagcaactggtgccccatcagcgtctccaactgcttgatgtgttggctgaccgcggactgggtcatggatttgcgggcggcagcgcgattaaggctgccttcgtccagggccacgatgagggtttcaagtagcgacagccggtccatcagcgctcctatcgcaaatgctaataccccttattagctctccgggactgtagagtaccagcgttaaactctatctcgcatttgtcggtgctttcgctgactaggatattggagcctcttatgaccctttcccgtagaactcttttgaaatccgtgggccttgctggtgcaggtcttgctgtaccttctctgggccagatggcgctggccgcaccaatggcccctgcgcctgtgctgcatcagttccgccttggcgacgccgtgattaccgcgcttcttgatgggcatctgtcgctgccatctggtatgttcaccggggccgatcctgaaaccgttgcgcagacgcttgccgggaccttctaccgcgaggacgcgcaggggctcgagatcccggtcaacgggtatcttgtggagcgcgcaggccagtacaccctcattgacaccggcacggctgcgctgatggggccggagcttggcgggttgatgggggccctcgccgcgacaggcgtgacgcccgatcagatctccacgatcttgttgacccatatgcatccggatcacgcgggtggtcttttgaatgcggacggcagcgcggcctttcccaatgcagagttggtggtggccgacgccgagtgggggttctggcacgacgatgcgattatggcctccgtcgacgaaggcagtcgcggcttctttcagatggcccgcaatgcggtagcgccgtatgcggatcggatgaagccgtttagtggcgaggccgaggtggcggcgggcttcagcgccatgccattgccgggacatacgccggggcacagtggctttatgcttgatgcaggctccgagcagctcttgttctggggcgatgtggttcatagcaccgcgcttcagttccgcaatcctgactggaccatcccctttgatgcggatcagtcgctggcggcccagacccgcaaagcgatgttcgaccgcgcagttgctgatcagttgctggtgacgggcatgcatctggatttccccggactcggacgggtcgaacgcgacggcggggcctacgcctttgaccaggcgccctggcaattcggcctctgaccaggggctatcaggcgtcgttccgctgtcgatctggggcgtaaatacgcgccgtttcggcaccggggcgacatgcccctccctttgctgtgtcgctcagtgtgcggaggggcagattcccttgtttccttcatgcgtcctataggctaaacgctgcgcaaccattgcgaaggagccatgcgatgaccagcggcaagaacgggctgacctatgcggatgcaggggtcgatattgatgcgggcaacgaacttgtggaccggatcaaaccggccgctaagcgaaccaaccgccccggcgtgatgagcggccttggcggctttggcgcgctgtttgacctgaaggctgctggctacgaggatccaatccttgtaggcgcgaccgatggggtgggcactaagctgcggattgccattgatacgggtctcgtggacggcgtcggcatcgatcttgtggcgatgtgtgtcaacgatctggtttgtcagggcgcagagccgctgttctttctcgactattttgccaccggcaagctggaaaccgatgtcgcggcgcgaatcatcgaaggcatcgccgaaggctgcgtgcgctctggctgtgcgctgatcggcggcgagaccgccgagatgcccggcatgtaccccaaaggtgattttgacctcgccgggtttgccgtgggcgccatggagcgtggcacagccctgccggcaggtgtcagcgaaggcgatgtcctcttggggctggcctccgatggcgtgcattccaacggctactctctggtgcggcagatcgtgaaatactccggtctgggctgggatggcgacaacccgtttggcgagggcaaactgggcgaggcgctgctgacccccacgcgtctctatgtcaaacaatcccttgccgcagtgcgggccgggggcgtcaatgcacttgcgcatatcacaggcggcggcctcacggagaacctgccgcgggttctgcccgacgaccttggtgcggacatcgacctcggcgcctgggagcttccgggtgtgttcaagtggatggcgcaaaccggtggcattgaagagagcgaaatgctcaagaccttcaactgcgggattggcatgatcctcgttgtgaaagccgaccgggccgatgcgctcaccgaggtgctcgagggtgagggcgagaccgttgcgcggcttggcactgtgacgcgcggggagggtattcgctacacgggcgcgctgctgtgagcgacaagaaacgcgttgcgatcctgatttccggcgggggctccaatatggtgtccctcgtcgacagcatgttgaacgacgccgatcatccgggttcgccttgcctggtgctgtccaacaacgcggatgccgggggcctctccaaggccgccgaacgcggggtcgccacggcggtggtcgatcaccgcccctttggcaaggatcgcgcagcatttgaggctgagctggtgcaacccattctggaggctggcgctgatgtggtctgtcttgcgggcttcatgcgggtgttgaccgcaggtttcgtgcgccagttcgaaggccggatgctcaatatccatccctccctgctccccaaatacaagggcttgcacacccatgcccgcgctctggaagctggcgacctgcgccatggctgcagtgtgcatgaggtgactccgctcctcgatgacggcccgattctggggcaggccgaagtgcccgttcatcccggcgacacgcccgatgatctggccgcgcgggtgctcgttcaggaacatcgcctctatccggcggtgctggagcgctatctgcgtggcgagcgtgcagtcttgcacctgagctgagccgaagcctttagggggtttgcaaccgcctcttggtcgtcgtatcaacgggaaaccgagcggcagaaacccttaaaaaagacccagttgatgaaaactctgaccaccaccgacgagctgcgcgccttttgccaagaggccgcgaaatacccttatgtgacggtggacaccgagtttctgcgagagcgcacctattactctaagctttgcctgatccagattgcctatcgcggtgatggggaaaccgacgccgtgctggttgacccgctttccggggatttgtcgctcgaacccttgtacgagcttttccgcaatgaggatgtggtaaaggtctttcacgccgcgcggcaggatctggagattttctgggtggatgcgggcgtttttccaaaaccgctgtttgacacccaggttgcggccatggtgtgcggctttggcgagcaggtcggctacgagacgctggtgcgcaagatttgcaagcaaggccttgataagacatcccgctttacagactggtcccgccgtccactctcggatgcgcaaaagacttatgctctggcggatgtcacccatctgcgccagatatacgagcatctgcgcaaagagctcgacaagaccaagcgcagccattgggttgccgaggagttgcaggtcctgaccgaccccgcaacctataacattcagccgcgtgaggcttggcgccgggtgaaaacccgcaccaactccgggcgtttccttgcagtggtgcgcgagctggcggcctttcgcgaagaatatgcgcaaaccaacaatgtgccgcgcaatcgcgtctacaaggatgatgccctggtggaactggcttccaccaagccccggaccgcgtcggatctggggggatcacgcctgttgctgcgggaggcgcgcaaaggcgccattgccgaaggcattctaaaagcggtcgagcgcggtgtgaactgtccgcaggacgacatgcctcaggcggatcgctcgcgcgagaaaatgcagatcaatggcgcacttgccgatctgctgcgggtcctgctcaaggccaagaccgagacctctggcgtggcggcgaaactgatcgccccttcggcggatctggatgcaatcgccgccggggagcgcgatgttcctgcgctaaaaggctggcggcacgaggtctttggcgcggatgcgttgcgcctgtgcaatggagagattgcgctcgcggccaaaggccagcaggtgaaggttgttgacctctagcgacactcctgtcgacatccgacgtcgaacactctgacaccaaaaaacgcgcccagaagcctgtggcgcgttttttgatgtgattacccggtgcaagctccgagtgcgtagtctaccgcgcagtgggcttgctcggagggggctcagcggcggatctcgcgggcgttttccttgccaactacgcgcaatacacgaatgccggtcaggtcctgttccgacaggctcaccgcggcgcggatggtgcgggtggcgactgtgccctgataagttgcggccttggggtaggtcacgcgaaaggtatattccaactgaccgggttcttgcgggtctgacggcaccaactctgcgttgaacgcaccgttgcgggcggcttcgccctccactgtcaggatgccacccacggaggtgcgctcgatacgcatgtccttgatgagcgcgatgggaaggctgcggtcttcttccttgtcgttcctgctgccaaggaggttggctttttcctcttcctgcgggatcagcggattgaggttttcagccgccggagcctctgcttcacgcgattgtccgaaccagttggtgggattgatgcgcgagtcgcgccacccgccacaggaggacaggaccaatgtgctgatcaaaagggcactaagagtgatacgcatgaatacctgccgcagtcagagttacttgcaaaactgactacccgattgaagcggcgttgaaaagcggttgaaaagacctggtctctggcctaggtccgagacagatcgtgatcacgagatgaggtttgacatggccagcgctgccttcgaggaaatcgtcgaggactttgagttctttgaggactgggaggatcgctaccgtcatgtgatcgaacagggcaaggcgatggcgccgctggacgacgcgctgaaggtgcctgcaaccaaggtggacggttgtgcaagccaggtctggctgcacccgcagattgaaaatggcgtgtttcactttgacggcgacagcgatgcgatgatcgtcaaagggctgatcgcagttctgcaaaaactctataacgggctcacgctttccgaggtgctggccgtcgacgcccgcgcggagatggggcgccttgggctcaatgatcacctttctgcgcagcgctccaacggtttgcgcgcgatgatcgagcgcatccgcgaaacggcggcggcccaagcgtaacagtggcgccaggggcaacctagggcaaccaaaaaggggcgctgcccctcttggcctttggcctattcaccccgggatatttctagtcagaagaaggattgggcgtggcccagtccatgagggtggtttcgagttccccgtagccggtgtgacggtgttgaaagtcgagccccatgcgcgctgcgcaggcgcgggctttttccaacaggtccgggtcttcggtctgcgactggtagatcagggtggtatagttcccgaagatcatgtcccgcagctcggggttcttatcaaggcccattggacgccacacaaaggcatcgaattgtttgaccagaaaatccgtgaggtaaaaggccgtgatttcaccggcgtcggcataggcgttaaagcggtcggtgccttcaaagaaggcgtagcaatgggggccggggaccatctcgacccccaattcggcgcagctttgttggagctgcccgcccgtgccgcaatcggcgtagaccacgtagatctgatcgtagaccgcgcggtgctttgtgacggcggcctccacatgggtgacgatctggtcaggataaagatgaagtttcgccggcaagcaggtcagatcgatgtgatcgaactgattggcgcgcgtgatcgccaggatttcacgcgccagagcgccacaggcgatcaaaaggatgcggccagttttgcgctctcgttctggggcggcgaggccgtgttcggtcaggctttgtgcgtcgagagatttgccctgtggcaaagacagagcggcccgctttgaaagtcgggccgcccgaccgcgtcgaggggacgcggtggccatatcaggcgttcatggcgttgtgcttgcgcgccacaaattctttggcggtttcaaccgcgacagccgcgtcgcggcagtaggcgtcggcgccgatggccttgccgaattcttcgttgaggggcgcgccgcccaccagcacgatgtaatcgtcacgcttgccttgctcgaccatcgtgtcgattacgaccttcatgtagggcatggtggtggtcaggagcgcggacatgccgaggatgtcgggtttgtgctcttcgagggcctcgaggtagttttcgaccgggttgttgatgccgatgtccaccacctcaaaaccggcgccttccatcatcatcgagacgaggttcttgccgatgtcgtgaatgtcgcctttcacggtgccgatcaccatggagcccatgcgcggtgcgccggtttctgccagaagcggcttcaggatcgtcatgccacccttcatggcgttggccgccagaagcacttcgggaacgaagagaatgccgtcgcggaagtctgcacccacgatggtcatgccgccgaccagtgcttcggtcaggatcttgtagggcgcccagccgcgttcgagcaggatgttgacgccttcctcgatttcttccttcagaccgtcatagaggtcgtcaaacatttgttggaccagttcctcgtcatcgagttctgagaggatgatgtcttcttcttccgacatatctgtcttccttagctggcgggcgggcctgaattggcgcttttatgtgtttttgacagatgttcagaactccactgttttgattgcgacattggcgcgtttcgaaccgacctttgcgtcgggaaataggtcagattgaccctttgaggcaggggcttgggggtttcttgagtttatgttctttatttgttctcataggtgtgccataaggaccaaatgcagaacacggatcctttttcgcctcgatgtcgcaaagcgcgcggtgcgctcagcaatgcggcaggccggtttgatctggcgcgcgaggcgcaggacgatggctggtggcaggaggcgccggatccttctgttgcgacagagattcgcaacgagctagcgcgcagcctgatctcttacaaccgttcgccggatctgccctttgaccgctcgatcaacccctatcgcggctgtgagcaaggttgcgtgtattgttttgcgcgcccgtcgcatgcctatctcggcctgtcgccggggctggatttcgaaacccggcttgttgcacgcagcaacgcggcagaggtgctgcgaaaagagctctcggcgcggagctacaaggtcgcgaccctggccatcggcaccaacacggatccctatcagccctgcgagcgggatcatctcttgatgcgccagtgtcttgaggtgctgcaggcgttcaatcacccggtggcaattgtcaccaagggcactctgatcgagcgcgatattgatattctgaccgatatggcgcgccgcggcctggtgcgagtcgggatttccgtgaccacgttggatgcgaacctgtcgcggcggatggagccgcgcgcgccggtgcctgcgcggcgcctggcgacgatccgacggctgagtgctgcgggggttccagtacgcataatgacgtcgcccttggtgccggggctcaccgatcacgagcttgaggcgctattggcagccgggcaggacgcgggtgcagatgcggccagctggatcatgttgcgcctgccgcgcgaggtatcgcagctctggcaggactggcttcaagagcatgcacccgatcgggccgccaaggtgatggcgcggctgcgcgagatgcatggcgggcgcgattacgatccgcgctgggggcaccggatgcgaggggagggcgagtatgccgagatgatcgcgcgccgttttcggctggcttgcaagcggcttggattggcagagcgcaccgcgcccctcagaacagacctctttgcaaaaccgctgcagcccggcgatcagctcagcctgttttcctgacaccgcttaattctgacagcgcataaataaagagcctgttcaatgaccggctctttcaaggacgcatgctgaggatcggatcagctgcgacggcgcccgcgacggcctcggcgctcagcgctggcatcgctgccttcttcggtgccgtcgttggccgagctgaacgggccaagcagctctacgatatgttccagcgtcgggcgttcgccgcgcgggcggctgtcgagggcttcacgcatcttgcgcagatggtccggcatggtgccgcagcagccgccgatgatcttggctccggagtcgcgcgccaggacggcgtattcgcccatcaagtccggggtgccgtcatagtggatatggccatcgacatatttgggaatacccgcgttgcccttggagatgatcggacgttcggtgccctgcgcggcgaatccgagcacggtgcgcaggatatccgatgccccggtgccgcagttggcgccaaaagcgagcggcggggtgtcgaactcctcgacgagtttggccagatcggcagaggtcacgcccatcatggtacgtccggcggtgtcaaagctcatggtgccgcaccagggcatatccaccagtttgaaggcctcagcggcggcggcaaattcctcgggagcggaaatcgtttcgagccagagcacgtctacgccgccttccttgagcgcgtcggcctgttcgtggaacatttccaccgcgagcgcgtgcgagagttccccaaccggttgcatgatttcgccggtgggtccgacagagccggcaacggcaatcttgcgttcagccttgtccgcaacttcgcgtccaagttctgcggcgatgcggttcagctcgcggacacggccttgtgcgtcatgcagcttcagacgtgcggcggtgccaccaaagctattggtcaaaaacagatcgctgccggcatcgaccgagccttgatagagtgccttgatcttgtctggcgcgtcggtgttccacagttccggcgcatcaccggactgcagccccatgttgaacaggttggtgcctgtcgcgccatccgccagaagcacatcacggctgtccagaagctcttggaaactgttgctcatgttcttgtccacttacccaattcgcacacagagcgctttggctccgcaaggcgttttctttgtcacgcggtccgttttgccgcaactgcattttcgacagtatcatcaggaatagggtcctgcagcatgtcgatctgcgccattgcagcctccggacgcgccggacgatgcaccagccgggtcatttcggcaatcgcgagccccatctgagcccagcttggcgccgccatgtatcgggcctcccaggtgggggcaaagcaggacttgaactgacgcaggccgccatcaaagcgcgcgctgaagcggtgatcgggaaccgacgcaagcgacaggcggcgcacgcccgcatcgcgcgcggcctcgaccgcggtgcaaatcatagcatgggcggtgccatcgggcgccccgggcaattggcgcaccagatcaaggcaccattcatccgccgcccggtgaaaggtcatgaagccgacaaggcggtcctcaagccaggcaagacaggtcatctggatcgccacatatcccggctcgaactggcccatcgtcgtgccacgggcaccgccgtgctggcgcgtccatgcggcatcaacctgggccatctgggtcaagggcagcgtcccccaggcgggctccacctgcagtccggccttctcggcgtggcgcagtttgcgacgcagttggcgatgcttggagccctcgacggtgaaggtctccggcgcaaggatggcgtcctgagccactctcaggatcttccaaccctcctgacgggctgccagcgcggtgcgggcactgcatttgtaaaagcaagctgccgcattgcgcgagagtgcatgggcgcgcagggcggcggggatctcgtcttgtcggccgctgattggatcaaatagcaccgcagagagctgcgggctatcaaggagcgccacttgattgagcccaaaggccatcacatggccgccgttttgcaagagcacggccgtttcggcctgcgggcggacgaagggctggctggcagcaggccgcagatcgcagcccagatcgccagtctcccaggggtccggcattgcctttccgtggcgcagcagccgtggccagagcaacacagcacccgcaagcatcgcgggcagcgcataataaactgcccgaaaggcgagaagtcctgccaccagcgtcgcgggatcggcaccgggcagaagcgtgagcattgcaagttccagcggcccggctccgcccggagaggaggagatgatcgccagtccaagggccagaaaataggcggtcagcaagacatcaaggccgatgccatgtccaaccggcagcaacagccagagggcgaccccggcaaaggtcacatccatcatggtccaaagcgccagcgcaaggatggcctgcacagaagggaaccggagccgcaaaccacggatgcgccactctgggtgcaagaagcacaggccaacagcggcgatcgcggcaaacaggatgcccccgcccacaaggcgcatcccccatgaaggtcccacaaggatcagaaagatcccgcaaatgacagcgagggctgtcatgaaggtgatgcccacaaacccggtcagctgcgccgaaagcaatggattcagttgcggcagcaggcgccaacgtgcaaaggaccccgaaaacaagccaaatccaacggcctgcgaaaaggcgatagcggccatgcccgcgcgccgtgcggtccggtcatcgattccgctgcgcaaatgccggtgtgcgaccgcgtcatagcggccaagagcccagaaactgagcacagttgccccgagggcgccgatccaatgcggcgcgggcacctgcgtgagcaggcccagaaggtcgtggaaatgcggcagatccgcttgtcgggtcagggcgaacaaacagcccgccataatgagcaggggcgtcaccaccctcagggaattcgcaaaggtctgcttgcgtctggcccgcatcggcatctcgcttccgccatttggagcagacgtcgcccgttttgcggaacgcgtgcctgccggttcagggaccggcagctctgtgcctcacgcatctgcgcgggccgggtgccgggatcaggtatcggtttgggggaggtcttctgccacctgcatcatcagctccatcatcttgtcccggatggctgcgcgttcgaccatgccttcgaggtcggtggcgagcttggcgaggacatcgtcgtcgcccggttcatccaggtcggcgataatgacggtctgggcataggcttctgccgcttcgtccctgtgccccaacagatccgcggcccaaaggcccagcagcttgttgcggcgcgcggttgcgcggaacttcagttcagcgtcatgcgcaaacttgttttcgaatgccttctcgcggtcatcaaatgttgtcatctcacgtcctcccataagaagtgggccagtggggcgtcagaatatccgctcttggccctcttggccctgagcgcaggatagcacatcaggacggagaggtgttttcacatctgagtttcgcatcgatgagagggtgcggcgtgccattctctgcactgtgaccgcgtccccgggtcccaccacgggaggccggacatccgcagatatccgtatgaagttgcccccaagctagcaggggttcttgaacaaaccgtcaacgaaataggtgcaaaaccctgcaacttcgcgtttcttgggcgaaatttttctctttttgcgcctttcgattaggaagagcaggatttgtggcgatgctgggccgagatcgccctgcgctgtgcttgcgggatgaggccccttgcactatgagagcgctacggatcggggcagattcccggtggtccataccgaaaggctctccatggcgcggcgcaagaagatttacgaaggcaaggcaaaaactctgtatgaagggcccgaaccgggcacgatcgtccagtacttcaaggacgatgccacagccttcaatgccgaaaagcacgacgtgatcgagggcaagggtgtcctgaacaacatcctgagcgaattcttcatgctgggtctggggcagatcggggtgccaacacacttcctgaaacggctgaacatgcgcgaacaactcgtgcgctcttgcgagatcgtcccgctggagatcatcgttcgcaactatgccgccgggtcgctgtgcaagcgtctcgggatggacgaaggcactcagttgccgcgtccgatcgtggaatattgctacaaggacgacgcgctgggggacccgctggtcaccgaagagcatatcgccgcctttggctgggcgagccagcaggacatggatgatatcttgtcgctggcgctgcgggtgaatgacttcctctctggcgtgatgctcgccgtggggatccgcctcgtggacttcaagatcgagatcggccggatctacgacggcgatttccagcgtcttgtggtggccgatgagatcagccccgacagctgccgtctgtgggacatcaagaccgggcaaaagctcgacaaggatgtgttccgccgcgaccttggcagcctcacggatgcctataccgaggtggcccgccgtctgggcgtcatgcccaacaacccacccgcgccgggcaagccccagctggtgaactaagagatttcgcccgcaagcgccgctccgtcggtcttgcgggtttttcaatagcgcaacagggcagggcgctcatgctcccgcccgcaggaacttgaggaaagacgcgatgaaagcacgggtgcatgtgatgctgaagaacggggttctcgatccgcaaggagaggccgtgcgtcacgcgcttggcgcgcttggctttgacaaggtcgaaggcgtgcgtcagggcaaggtgattgacctggagctggccgagggtgccactgaggccgacgtgaccgagatgtgcgaaaagctgctcgccaatactgtcatcgaatcctacagcgtcgagatccagtgatgaaggctgctgtcgtcgttttccccggatccaactgcgaccgtgaccttgccgtagcttttgagcaggccggtttcgatgtctcgatggtgtggcacaaggacagcgaactgcccgagggggtggacatcgttggcgtgcccggtgggttttcttatggggactatctgcgctgcggtgcgatcgcggcgcagtcaccgatctgcaaggccgtggtcgcgcatgccgagcgcggcggatatgcgcttggggtctgcaacgggtttcagatcctgaccgagaccggcgttctgcccggcgcactgctgcgcaatgcggggctcaaatatatctgcaagaccgtcgacctggcggttgcgacctccgacagtgccttcacccaaggttacaacgcaggcgatgtgatcggcgtgccgatcgcgcatcacgatggcaactactatgcggatgacgccacggttcagatgctgaaggatcaggaccgcgtcgcgttcacctatgtggacaatcccaacggttcggtcgcagacattgcggggatcctgtcggaaaaccgtcgagtcctgggcatgatgcctcaccccgaacgcgccgccgacgaaggccatggcggcaccgacggtgtggcgatgttccgcgcattgtccggacttctcacggacgcctgacttgagcctcagaggcggtaaacctagtgttgcgtcatgactgcctctgaggagactcccggcgcaaagccgcctgcgccttctgaacgtcgtgctgagcgcccgacgttgaggtcgcgcacgatctcctggcgcgtgcgcctggcacttgtggccttcatggccatcgcaggggcgaccgtctggttcaccaactccacgttgacccacagttttaccgagaccacacgcaatcgggcggaactgcggcttgcgctttattcaggcaacctcgtcagcgaattgcgccgccacgcgattgtgccgcagcttctgtcgcgcgaccaggcgctgatctcggcgctgcagagccaggatttttcgctttcgacccagcgcctcatttcctttgttgatgaaatcggtgcggcctccataaccttgatggaccgagatgggcgcacggttgcggccacggatcgtgttcgactcggtgaaatctatcgcaatgcgcccttctttgttgaggcaatccggtcgaacgccaccgtgttttcggtgatcccgcgcgaggtgcgggggtatcaattcacgtattcgcgccgtctcgtcgacagcagcggcacgcttggcgtcattatggtcgaggtcgatctgcaaaagttcgaacgcgcctgggcgggcatttccgacgccgtgatggtggccgacagcaccggcaccgttgtgctcgccacagaggcgcgctggcgggggctctcggaaggggaggccctgaaggagcaaacaccggagggtgcgatccagcgtgccatccgcgcgactgcggattgggctgccctgcccaccgatgtctacctgcaaggtgaggcggtgatgcggctcgagactcgggtgccgttccaggggtggcggatgatgtcctacaccacctatgattcgatccgcgaacaggtcaacgcggtgattgcgctcgaaatcatggggtttgcgatcctgcttgcgttggcgttttacgcgttgagccgcaagacggcgctgcggatggcgctgtttcagcgcgagtcggcggagcttcgcgtgttgaatgcgcgcctgcagcgggaaattgccgagcgtgaacgggtgcaaaagaccctcgctgtggctgaacaaagccttgcgcagagctccaaactggccgcgctcggagagatgtctgccgccgtgagccatgagctcaaccagccgctggcggcgatgaaaacctacctcgcgggtgcgcgcctgctcctgcaacgtaaccgccccgacgaggcgctgtcgtcttttgggcgcatcgacgacctcattgaacgcatgggggcgatcacgcggcagctgaaatcctatgcgcgcaagggtggagacgcgttcagcccagtaaacatgggcgatgcgctcgcctcttcgctgtcgatgatggagccgcaactgcgccagcgccacgtccagatcacccgtatcctgccggatgagccggtctttgtgatggcggatcggatgcgactggagcaggttatggtgaacctcttgcgcaatgcgctggatgccaccaaatctgttgaggaacccgaggttgagatcatcctggccgccggtgaaactgcgaccctcacggtccgcgacaatggcgacggcattcaggatttcgacagcctgttcgagccgttttacaccaccaagcaaccgggtgacggtgtcggacttgggcttgctatctcctcggggatcgtgaacgacctaggcggtcgcctcacggcccgcaattccgatgcgggcggcgcggtgtttgaaatgcaactgccgatcctgatggacggcatcgaggccgccgaataggcggcacgacctggagggcaacttatggcacaggccatgaaaattgcgattgtggatgacgaacaggacatgcgtcagtcgatcagccaatggctggcactgtctggctatgacaccgaaacattcgccagcgccgaggatgcgctcaaggcgctggggccggattatccgggcattgtgatttccgacatcaaaatgccgggcatggacgggatgcagttcctcaagaaactcatgggatcggacagttcgctgccggtgatcatgatcaccggtcacggcgatgtgccgatggcagtcgaggccatgcgcgtcggagcgtttgattttctcgaaaaacccttcaaccctgaccgcatgtcggagctggccaagcgcgccactggcgcacgacggttgacgctcgatacacgtgcgctgcgccgcgagctttccgatggcggtcaaatcatgaagaagctgatcggaaccagccccgttatggaccgcctgcgcgaggacattctcgacctcggccaggcggatggccatgttctgatcgacggggaaaccggcaccggcaaaacgctcgttgcgcatgcgcttcatgccgtgggcagccgcgcgggcaagaaattcgtgctggtgtcctgtgccgctcttgaggaagaagcactcgccaaacgtctgtttggtcccatgcagcccgaagacagcatgctgcccgccgtcgaagaggcccgtggcggcacccttgtgttggaggatgtcgaggcgctgagcgaagccctgcaggcgaagctcttgagctttatcaacgagcagggcattccgggcgagacccgcatcattgcgatctccaacctgcaggaggcggggaaaacctccgaggatgtactgcgcgccgatctcttttatcgcttggccgcgctgcgcatcacggtgcccccgttgcgccagcggggcgaggacatcctgacgctgttcactcgcctgtcggaacaattttccgaggaatacggctgcgaggcgccgcaggtgacggcgcaggaggctgcgcagctcttgcaggcgccgtggcccggtaacgttcgtcagctgatcaacgtggcagagcgcgcagtgctgcaatcgcgccgcggctcaggcaccattgcctctctcttgatgagcgaccacgaagatatgcagccggtgatgaccaccgaaggcaagcctctgaaagaatacgtcgaagcctttgaacgtatgttgatcgacaacaccatgcgtcgtcacaaggggtctatcgcttcggtgatggaagagctctgcctgccgcgtcgaacgctgaatgagaaaatggcgaaatacggcctgcagcgctccgactatctcggctgatgcccgcggggtatctctttgatatggatgggctgctccttgatacggagcggctcacgctggacgcctttctcgattgcgcgccggagttcgatctggatcccggcgagatgcgcgcgttcttcatgaccctcattggcagcgcccggacgcagggcgaggccatggtgcgcgacttcatcgggccggatcgcgatttcgacgcacttgatctggcctggcagcaccacagccagaggcggcttgcggcgggcatccccgtcaagccgacggtcgcagagacgatctcagcccttcatgcatctggggcggtcatggctgttgtgacttcgacatttggtgacaaggcccgccatcaccttgaccgagccgggttgttgaggtgttttcggaccgtaatcggcggtgatgaggtccctgcaaacaaaccggatcctgcaccttatgttcaggcggcagagcagcttggcgtaccgccccagaactgcgcggcttttgaggacagcgacacagggatcacggcggcggcgcgggcaggctgttttgcagtgcaaatcccggatctgcgcccaagcgcgcgggcgtttccggatgttggacagcgtttcgcgacgaccctcacagaggccgtcaccaccgctcaggcccactttcaccatgagcgccgtcggcagggccgcagtctctgacgtaaaccgggatagttttgcatcaaaacgccgctccacgccccggtcttaaccttgcctttgaaatttgcaggcaaggatgaaaatacctctctcggcggtgcctgcgcagaatgaccattgtcattacctatccacaggccttatgctgaaagacggagcgccgcaaaacaggtgttcacccatgagattttctgtcgtcatgtccgtccggcccacgccggggcatggctgacagtccagaacgtctcgcagactgcgaggctgaagagtgcctgctttgacgcggccgagactcggtcagatcaaagaggaaataacgggcagggttcgggatatccccacctgtcggagaagaaccgcgatgacgcgcgcgagacgattgagcactgacgcaggatttccgcctttaagccggaattccctttcgtgcatctcctggtccgtgacgcagtcaaatatcgccctgacaagacaccacccacaacatgttcgtccacccggacccggcgcgggcacgggggcttcggcctcctgtcgtatgcgccccgaccggaggcaacctgtactggcatggtgcaatccaaggactaatggcgaagaaaatgctgatcgacgccacccacgcagaggaaactcgcgttgtggtggtggatggaaacaaagttgaggaattcgactttgaatctgaaaacaaacgccagctggctggcaatatctatcttgcaaaagtaacccgcgtcgagccttcgctgcaggccgcttttgtggactatggcggcaaccgccatggcttcctcgcgttttcggaaattcacccggactattaccagatccccgtcgcggaccgcgaggccctgatggaagaagagcgcgcctatgccgaggcaatgcgcgcccgcgatgaagaagacgacgaacccaagcccaagcgccgcagccgctcgcgcagcaagacccgcgctgaaaaagccaagaccgctgacgccgttgaaacaaaagaagtcgccacccccgagggtgagatttccggaatggagacaattgacctcagcgatgacagcacggtgctggcagaggtgccggaggcgacctcgccgatggaaaccgtagcagagaccccggtcgaggaaccggtgggcgatgatgcagcggcagagatgcctgaggcggacacaactgacggcgaagcgccagcgggcgacgacagcgtcgtagcagaacccgcgacagatggcgaagccgaaaccgtggccgaagactccgccgctattgaagaggcggatgcggacgacgacaccgatgaaggtggcacagaggatgcgcccgaggcgaaaaccggtggggctgatgcagccgacaaggatgacagcatcgagtcggttgccgacgacgatgatcaggaagacattcgtccgccgcgcaaaccgcgccccaaacggtacaagatccaagaggtcatcaaggtccgtcaggtgctgttggtgcaggttgtcaaggaagagcgtggcaacaagggcgctgcgctgaccacttacctgtctcttgcaggtcgctattgcgttctgatgcccaacaccgcccgtggcggcggcatctcgcgcaagatcaccaatgccgcagaccgcaagaaactcaaggacatcgcgaccgaacttgatgtgccgaccggggcgggactcatcgtgcgcaccgccggggccaaacgcaccaaggcggagatcaagcgcgactatgaataccttcagcgcatgtgggagcagatccgcgaactgacgctgaaatccatcgcgcccgcaaagatctatgaagagggcgacctcatcaaacgctcgatccgcgacctgtataatcgcgagatcgacgaggttctggttgaaggcgaacgcggctaccgcatcgccaaggacttcatgaagatgatcatgccgtcccacgccaagaacgtgaaaaactaccaggatcagctgccgctctttgcgcgttatcaggtggaaagctatctcggcgggatgttcaatccgaccgttcagctgaagtcgggcggctatatcgtgatcggcgtgaccgaggcactggtggcaatcgacgtgaactccggccgggcaactaaggaagcatcgatcgaggaaaccgcggtcaagaccaacctggaggcggccgaagaagtggcgcgccagctgcgtctgcgcgatctcgcgggtctcattgtgatcgacttcatcgacatggacgagcgcaagaacaatgccgccgtcgagaagaagctcaaagacaagctcaagaccgatcgtgcccgtattcaggtgggccggatctccggctttggcctcttggaaatgtcgcgccagcgtctgcgtccgggcatgatcgaggcaacaacagcgccttgtccgcattgtcacggcaccggacttatccggtcggacgacagcatggcgctgtccatcctgcgtcagatcgaagaggaaggcacccgccgccggtcgcgcgaagtgctggtaaaatgtcccgtggacatcgcgaactacctgatgaaccagaagcgcgagcatatcgctcagatcgaagcgcgctatggcctgtcggtccggatcgaaggcgatgtgaccctcgtcagcccggatttctcgcttgagaagttcaagacggcatcgcgcgcgatccctgcagtcacgacccctgtggtgtcggtggatgcatcgatcatggatcaggtcgatgccattgaagaggttgctgaaaccccggaggaagcgcctgcgccccaagcccctgaagccgatgaaaccgaaggcgaggcaaagcccaagcgcaagcgtcgtcgccggcgtcgcaagaagtctggcaatggcgagaacggtcaggacgctgacgcgcaggcaagtgaggcaaatgcctccgatgcctccgatgcggcgacagactctcaggatgctgagtcagattccaaaaccgaaaccgcgccggatgccgctggcgaaggcgacggagaggcggagcccaagaagaagcgcactcggacgcgcacccgcagccgctctcgcaagaaggtggaaaccgaggtagctgcagaggcagaggctcaggacgccgctccggaagcgacgccttcggaagcctctgaggcagaagaggcagccccagccgaaccggcagcacctgctccggttgaggatgcggctgttgatgaggcgcctgttgtcgctgcagagaccactgcatccgaagaggcaactgcggaggaagcaccctccgaggcaccgcagaacactgcagactcgcaagaggcgccgaaggccgagactgttgttgccgagacgacacctgctccggtcgcagcagaagaggccgcatctgaagaagttgctcctgaagagaccccggagccggttcaggaggagacccacgcagaggttgaacccgaagaggcgaagccggaaccggcgcttgcggttgcggaacctgaacccgaggaaccggccaagcccaaacggcgcggctggtggtccgtgggtcgttaaggacctcagagacttgaaaaaggcggctccttcgcaggggccgcctttttcatttcatgtcgtatgcgtgtgcgatctgccagcgcccacgtacagttgtccgggcatttggcgcgcaggtctcaggctgcgcccttgcggatgaggtacacctggtgggaatcttgctcttccattcccagaaactcatgcccggcttcggcacagaaatgcggcacatcaatgattgcggccggatcatcagcgaggatgcgcagaacacccccttcgcgaagcggttgaagacgttttctcgccttgagtacgggcagagggcagaggaggccgatggcatccagagtggcgtcaatatcagtcatgctttccgagataaggcgcgtgttacagcctgtccacaaggatgtgacacagcgtgcaggtgacgccgttgtgcgcagcgactatgtacgggtcatgtttggaatcgagatcatagacgcgagccttctgcccgccatgtttgttgcccttgtcgggggcattatcagctttctgagcccctgcgtgctgccgatcgttccgccctatctggcgtatatgagcggcgtgacgattggcgagatccaaggcacggccgctgctcggcgcaaggccatcctggcggcggtattctttgtgatggggctgtcgacggttttcctgctcctggggttcacggcctccgcgtttggcgcatttgttcttcaaaatcaggagctttttgccaaagcttcaggtgtcgtcgtgatcatttttggtctgcatttcctgtcggtttttcggattccgatcctggatcgcgaagcgcggatggaaaccggcgagaccggcggctcggcacttggggcctatgtgcttggtctggcctttgcctttggctggacgccttgcatcggtccgcagcttggcgcgatcctgtcgcttgccgcctccgaggcgtccgtgagccgtggtacgctcctgttgggggtttatgcactggggttgggcgtgccgttccttctggcagcgatcttcctcaacagatccatggtgctgatgaaccgtatcaaacgccacatgagcctcattgagaaactgatgggcgggttgcttctggtggtgggcttcatgctggtcacagggcttttcaccagcttctctttctggcttctcgaaaccttcccggcactcgcaactctgggctaaggaccaatcccaccgccaccccgccgcccacgcggggtgcacgcaccatcttacactgcgcagcaagctgagttaggcttgggcgcataaagatcggggcgacaagatcacgcatgagcagcacatccagcgcaggtccggtgcagagacgccgggtgttttacataccggggtatgacccgttccacccgcgccgttaccgcgagctatatcgcagcgaaggggcggagcaggccgagatttcgggctacgatctgacactgcgcccgaaatcctcgccgggaccattcggttggcatgtgagcgcctctatcgagggggccgatgtcgagaccgacatcgaggttctggtctggtccgacatcgtcaagcacagcatgcgcagcacagtcgcggcgacctattggcagcttttgcgaactgtttggatctatgtggccacggggacattgtggcgtctgatgcgcctgcgaaaaggaccggtgattgccgcactttacccggtggccattctcttggtgcaggccttccttgcgctcctggcaggctatgcgttcgcccgattaaccggggtgattggcgcgtggttctccctgcctgatctggttgcgatcttcctgcaagggtcggttggggctggggcggctgtgatgttgctgaggctgttcaaggcgcatgacaacaagctctttgtatattacctcatgcatgattatgcttattctgcagggctttgtggcgcgatccctgccgagctcgaggcgcggatgaaggcgtttacagccactgttcgcgatgcgctcactgaaaacaccgtggatgaggttctggtggtcgggcattcctccggcgcccacatcggggtttctgtgctggctgatctcttgcaggaggacctgccagaacagcgtcccgtgctcagtctcctgacattggggcaagtggtgccaatggtgtcgttcctgccgcgcgccacgcgtctgcgacgtgatctgcgcgagatttctgagcagcagagcatcgcatggtatgacgtgaccgcacccggcgacggctgcgcgtttgcgctctgtgatccggtggcggtcagcggcgttgcaccacctgagcagcgctggcccatcgtcttttctgcggcgtttaccaagaccctcagccccgcccgctggcaggcgctgaagcggcggtacttccgccttcattttcagtatctttgcgcgtttgatcagcccaagcactatgactattttcggatcacggctggcccattgacgctcggcgcgcggctgaaggcgcgcggtcattctcgctctcgtctggcaaagccgttgagccgctaccgggatatggacaagcgatgaccctgcgcccgccaaaacccccggtacggcctgacagagtctcgctctggcgctacctgaagctgtttcgggccgatattctgtcggcgcagccgcagcggctctatcgggcgtggatggcagagtttcgcacgcccttctttcggtccttcctggtcaatcaacctgcgcttctggatgtgatcctgaaagagcgcccggatgatttcccgaaatccaaccgcgtgggcgaggggctgcggccactccttggaaactccgtctttctgaccaatggcgagacctggaaacggcagcggcgcatcattgatcccgcctttgagggcggtcgactgaaggagagctttccagcgatgcgcgccgcagccgaggcaggggttgcgcgtttgcgtccacacgcggatgggtcagaactcgagatcgaggctgaagcctcgcatatcgcggcggatgtgatctttcgcacgctgttttccattcccatcgaacatgaggtcgccgcagaggtcttttcccggttccgcgcctatcagcaggcgcagccgatcctcaatctggcggcctttgtaccggtgccccgctggatgccccggttctaccccaagggaacccgacagaacgcgcgccatattcgcaggctgattgctgatctgaccaaggctcggatggcagagattgccgcgggcacagcaccagacgatctggcgaccaagattatgaccacgctggacccggaaaccggcaaagggtttggagccgaggaaatggtcgatcaggtggcgatcttctttctggccgggcatgagaccagtgcctcggcgctggggtgggcgctctatctgttggcgctttatcccgaatggcaggagaagctggccgccgaagtagcagagcatggtgcagaggaatttgcggatctgtcaaagctgcgcctgacgcgcgatgtgtttcgcgagacgctgcggctgtatccaccggtgccgatgatggtacgcgaggcagttcagacagagaggttccgggaccgcgaggtgctcaggggatctcagatggtgctcagcccttggcatctgcatcgccacgaacgtctctgggagcggccggatgagttcgatcctggccgatggcagagcgagaacggaaaagcctgtgcccggaacgcatatatgccgttctcggcgggctcccgggtctgtacgggggccgggtttgccatggtcgagggggtcttaatcctcgcgcaaattctgcgccactatcgcatcacgcctgtcgaaggtcggagccccgagcccgttgcgcatctgacggtacgctctcgcacgggcatctggctgcgtttttcgcatcgctagctacgcgctcaggtcacggtttctgccttgagggcgctcaggacatagagacgaatggcagaggcaagcccgcagtccgtaccgcgctgctcgtcaatctcggcggcgagctcattgatcgcccgaccttcgcgcgcagcgaggcgacgaaattcgctccagaaagcatcctccagcgagaccgaggtccggtgaccgcgcagggtgagggagcgtttcttgggccgttcgccaatcatgatctcatgccttcagtagacgtgcttcttgagcatttatagagggataacatgtagggccataggcattgagatccgcctccagagccgggaatatctcaaaaagctcgcgccggaccgcatcttcggcagccgcaagcgcccaggcaccgggatggtagctttcggaatagagcccatcggcctcgatcacctcatggcgatcaaacatcagatgcacataggtgaccggcatgccactttgatcctgtcgcacactggtgccgttcaccagccccttggccggtgcgaggatggcattgctggcaaagaggagcccgctcatgtgggattcaatgagaatccggtgctgtggagacactttgaggcggcgtttggggcagcccggcgccagtgcgtctggctcaaagatgattggcgccagatgcggttgacggtcgagatctgcgcgtgacaggcggcggtgatatttccaccgcagggtctgataaccattgtcccgtgtcagcacgcgatcgcccacggcaagatcccggatgcggcgcggaccttccggggtggtgacctgcgcgttgggcgtaaaacacacgatcacggccccctgaatgtcatcataggatccggcatcggtcgcgtcctcgccgaggtattgacgataccaatattgataggagcccgtcagctcgtcatcgttgatgacattgtgggtccggtagctgtaattcacatcccgtaaaagcggcgcagttggaagatagccaataagtgtgccgccgctttccagcgcataaacggtaatttcgctgccatcatcgccggtcagcacatattgattttctgcatagacttggtcgttttgcacaaaatctccgccgatacgcgccaatgtgctgccatcgctttcaaaaaccgttgcccgctggttgctgtcgataccgcgctcatttcgggtgaaatccccatccagcgtggaatcgtcatctgtgagagacacaacgcgccgatcagaaagcgggtcaaaaccagagtttacgcggatcgtaccgccggaaaacgtcagcgcatccggcgtgtagacaaaaaagtcatgggtgggcatgcctgtgatgcctccgtcgaaaattgaatctgctcgttgcgccattttaaagaagcgcgtttgacgcatcagtatgcgcgcgaaatgtaaaaaggtaaagaaattgctaacgcaaatatggggccgcgcgcagagcagggcgctttgaaaatggcgcctgtgctgtgatcgccctaatcgtcaatcttgtggccgtccagatgatctctgccacgttgatcaacggttttgtcgcgttgtttttcagatttgctgcggccgaatttcacagcattttggtcagcgcgggcctttttctcggcccgcactttttcttttctgaaccggttcaggtttaccggttttcccatcacttcgccttggggccgatcatctgctcggggcggacaaccttgtcaaaggtctcttcgtccacaaagccgagtttgatcgcctcttccttgagggtggtgccgtttttatgcgcggtcttggcgaccgtggtggcgttgtcgtagccgatggtcggtgccagcgcggtcaccagcatcaggctttctttcatcagcttgtcgatgcgcggctcgttggcctgaatgccgctcagcatccgctcggtaaagctgtcggccgcgtcgccgaggagctggatggactgcaagaggttataggacatcatcgggttgtagacgttcagttcaaagtgaccctgagagcccgcaaatttgatcgcggcgtcattgcccatgacatgtgctgccacctgagtgagcgcctcggcctgggtcgggttcactttgcccggcatgatcgaagagccgggttcgttctctggcaggatcagctcgcccagaccggagcgcgggccagagccgaggaaccgaatgtcgttggcgatcttgtagcagctgccagcgatggtcgcgagcgcgccagagaggaaaaccatcgcgtcatgcgctgcgagggcttcgaacttgttgggcgcggtcacaaacggcaaaccggtgatttctgccatgtttgcagcgacttcctcgccccagccttctacggtattgagaccggtgccaactgcggtgccgccctgtgccagctcgtagatgccgggcattgcagcctcaacccgggccagaccctgacggatctgatgcgcgtagccgccgaattcctgacccagtgtgagcggcgttgcatcctgcgtgtgggtgcggccgatcttgatgatgtctttgaattcctcggccttggcttccagcccctcggccagtttcgtgaggcccggcaccaacacgtcgcgcacggacattgcggtggcgatatgcatggcagtcgggaacgtgtcgttggaggactgccccatgttgcagtgatcgttcgggtggactggatctttggagccaatgacgccgccgaggatctcgatcgcgcggttggcgatcacctcgttggagttcatgttggactgggtgccggacccggtctgccagaccacgagcgggaagttgtcgtcgaacttgccctcaaccacttcgcctgcggcctggatcaccgcatctgcgatcttggcgtccagcttgcccgaagctttgttggccatggcgcaggccttcttgatcacgccaagcgcgcgcacgatggcgacaggctgtttttcccagccaatgggaaagttcatgatcgaacgctgagtctgcgccccccagtatttgtcggaagggacctcaagcgggccaaagctgtcggtttcggtgcgggtgttcgacatcgtgtctgtctccgtcgctggttcggccacttggaacattcaagtggtatactgatgtatgccgtttacccctgctggcggcgcgacgcaattgttctgagacgcggacgcctgacgtggggtttctgggctcggtatactgtcccagaccagcaagtgccattgccagtttggggaagatgcatagattagtctaaagaagagtcgtcagaccaccgcaccaacaggagttaaagttcaaaccatgcgcagcatcgcccttagtccgcctcgcagcctgccagagacctctcgcttggcgctctgggcgtttatggcgctctcggtgctgatgctgagcgtgcaaagcgctcttggctctgagctgctcgataaattcgtcggctcctattctggcagcgccgaagtggaacagatcgacggcacggtggaaaaacgcgacatgagcgttgtcatccgtgagacctctaaagggttcgaggtgaaatggagcaccgcgatccgtcgcgcagatggtgattccaagactaagagctataaaatcgagttcctgccgtccgagcgcgacggcgtttttgctgctgcaatgcagacaaatgtatttgggcatacggtgcagatgaacccgatgaagggcgagccctacgtctgggcgcgtgtgattggcgatacgctcacgattttctcgctttatgttgccgagaacggcgactacctgatgcagcaatatgatcgtagccttgccgagggcgggcttaaccttgagttctcgctgcatcgcaacggcaaaccgtcgcgcaaggtatccacgttcctgacccgagactgatccgtaacatcgccctaggaccgaaagacgacggtgtcactgcgatagggatgctccgaaatagaaacggcgccgccgaagagatcggggcgccattttgcatctggacaacacgcgagtgcggggaagaccccgcgccgtgagattatttgcggaagctgtccagcgacacaacatcggcgtctttcttggctgccggtgcgtcgtcctcttcgacgtcctgcatgtcgcttgccacttcgatcggcggcatatcctcgtcatcgtcttcatttgcgctctcaaaccggaggccgaattccactgatggatcgacgaaggtcttgatggcgtcataagggatatacagcggctctggcgcgtcaccgaaattcagggtgaccgaaaagccttcatcggtgacattgagattgtcgaaccagtgctgcatcaccacggtcatctcgccgggataccggtctgacagccaatcggccagttccgcatccgggtgcgaggtgtcgaacgtaataaagaaatgatgagcccctggcaggccatgctcagcaacatcgtcaaggacattacggattaagccacgcatggcacgatgcatcaggttaccatagtcgatctgacgggacatcgcctcaccttttataattgggggtgcggccctggtaccttcggtcgataccgcaccttagctctttcagttttggacctattttgagggcattgcaagccaagcccgcgcgctttagccgaccgtgaagcctgcaacaacaagtccaaagcacgccatggttgcaaggagccaaaggatccgcccgcgcaagagagcagccacgactggcgccagagcggtcaggatcagcgcagtctggtcgaggctgccaaactcgggcagaggtaccgagatcggcccaagatctcgatgggtgttggtctgaaacagcagatgcagcaaaaaccaaacagagagattgagcatcatccccgctacgcttgccgtgattgccgccagagcactgcgcaggcgcgggtgggccgtcagtcgttcgacatagggagcggtagcaaaaatccagagaaaacagggcacaaaggtcgcccaaagcgcaactgctccggcggcaatcgcgagttttgtgccgcccatttcggaaccggcaagcatggccacaaactgcgtcacaagcacaagcggcccgggcgtggtctccgcaagacccaatgcgtcgatcatctgtcccgtggtgatccagccatgatcgctgacgacagtctgggtcatatacgccagtacagcatatgcgccgccaaaggtcacaaccgccagttttgcaaaaaaccatccaattgtggcgagaaactccgccccgatcagactgaggccgagaaggggcagaagccagagcgccgtccaaaacaggatggtgcgcccatgatgcgccgggacatgatgcgccgaaggcaggggatcggtggatggcgcgcgttgaaggagaccaattcccccggcgagaagcaccaccaaaggaaaggggaggtcaaagacaaagagcgccacaaatccaccaagtgcaagcgcccaggcaccggcggtcttgagcgctttttgcgagatccgccagagggcctgaatgacgatcaccaccaccgcagccttgatgccgagaaatgcggatttcaccgcggggagggtgccgaagcttacgtagagaaagaccagcgctgcaatcaccagcgcgccggggatgatgaacaggctgcccgccaagagacctccgccaacgccacgcatgcgccagcccgtgtaggtcgccagctgcatcgcttcgggccccggcagcagcatgcaaaacgacagccctcttaaaaacgcttcttcctcaagccaatcgcggcgatccacgagttcacggtgcatcagcgcaatctgcgcggcgggtccgccaaaactcagaaggccgatcattccaaaacagtgaaacagcgcccaccacgaggggggcggggtctgcgaggcgaggggagtggtcatcagggcggcccggttgattacacctgcgccccttctatcaaagcctgacaggatagccagagccttgcccacccgccgagcaggcgggatgggccgtcatctggtctggattattcgacccaggtcagcttctctccggtcaggcagaccggcagggcgtcgctgggcaattggccgagctgctcgaacatccgcaagtagtcaaagttcgaatagaactcgacaaagcggccatcgcgcacgcggacacacatctgaccggtgaaatccaattcgcgcgtccgggtcagatcgtgggcacgtacctgtacgcgcaccatcgccagatcgccatcatccatgctgtgggtgatggtcacataaggctgatccagccgcgccttgagcgcgccgaccacttccttgtagtccacaccgggggctgctacgccgtcgagcgcgccattgaaggttacatccgggtccagaagctcgtcgatgacggagaggttgtctttgttccagacttcttcgaaccagtatttcagcagggcgctgtttttcatctcagagaagcttcatcatcttaacagttaccaaaggcgccgcctaagtgaagttacacataatgtcgagagccataacgccgtaacttcgcaaccctaccgttaaatagcggtgcggtgtcgagaatttcctgtcaaactttatggagatcggggcgcagacgccaccgatggcccctgtgcagaggctattgcgcgggggtgtcttcggaaatgggagaacggaggctcaaggagaggagtgcaggtttctgttgccaggtacctgcgaaccccgcctaacgcggctaggcgctaggacttaaagtcggttcgactcgaactgcttacgcagccagagcaaccggagcacgattgtcgtttgcaattgtactgttttcgccggtaacggtggcagacagccgagacaaagctaacccctttagacgtccgtcgatcctatttcggccccccggttccgaataaactccccaaacgaaggagaaagccggaagtgatttggtggagccgccgggtaccgcccccgggtccgatccgcttattacgagcgcgtttatgtccatagttcccgaaggaacactccaaatatagggtggtttggaggggagttaaaggggagaattgacgtgctgacgcgcgttgcctccggcggggatatttgaaagaagatgaagagggtcagcgttttgtcgcgcggcgggcaaagacatcggcggcgaggttgcgcgtttcctcctctaatgcgctgagacccgcgactgccgcgtctcccttgccggcttcgatggcatcggcgacggtggtgtgcagcgcaagaatggtggcgcggtctcttgcggtgaaggtgatcatgttcatgaggggctgcatcgcctcgacggcaccggcaagctggtaggacaggaccggattatgcgcgccatccaccagagcgcggtgaaaggccacgtcagacgcgcaaaaggcctcatccgtgaggccgggctgaccctgtcgaaagatctcggcgcgcatggtggccagctggtcggcggtgcgacgctctgcagaaagcggcgcgcaggcccgctccagcgcatagcgcgcttcgcaggccgtatcgaaactcaccgcattcatgctgagcagaagggtcgaggtggtgatctgctggctgtaagcatcctcaaaactcagccgattcacaaaagccccgccagacgcgccgcgttgtgtgcggatcagcgattgcgctgcgagcctcttcaacccttcgcgcacggtggcgcgggaaacctggaactgctcggccagttcggcctccgagggcaggcgttcgtcgacaatcagtgcgccagagatgatggcgtcgcggattgcagtggcaatctgagcggagagatcagcgctgcttttgggatcgatcttcacgagtatgtgccctcacgtcagattggggggtgaaaattttcatttgtcagacatttaaaagtctgacatttgattcacaagagggaatgagtcgcagcgagacggggaggtcatcgcaaacgccatgctgaaagcacgcctgacacagagtattcgccagatgagcggcctgcattggctcttgctctttgctggtattcttctggcctgggctgggctctttgccatgtcggtgcctgcggatctgcgtgcagcggggcaggtctacggggcggatttctggctggcactctgtacaatgaccgcggatgcagccggtgcgggcaagatggtcctgatgtggggtctgatgtcggccgcgatgatggcccccaccgcgcttccggcttttgccacctatgacgatctgagccaaaccggtgagaacactcgttttggtgatctggtgtttggctatctgacggtctggatcggtttttcggtgcttgcggcggcgctgcaattggggctggttcgcgcggatctcatcaccgtgtttggcgatagtcgctcggggcttttgtctggcgctttgctgctgattgcgggcgcctatcagttcacaccactaaaggactcctgcctgtccaagtgccgtcgaccgctggtgttcttcatgcagcactgggacgaagggccttggcgcaatggcctgcgtctgggcgcggtctgtttgggctgttgctgggcgctgatgctgctggcctttgtcggcggggtgatgaacctcgcatttatggcgctggcgacggtttttatggttttggaaaaattgcccgaaatcgggcgctggttgacccgcccaatgggcgtgatcctctgcgcaagcggtctttgggttctgatgacatctatctgaatttggaggagaattcacatgacaaatgacagcatcaagtctgagacagaggtcgcgccgcgcgatcagagcgcggttggaacaattccttgggcgatcaagggcgagttgatcctgaactgcaactgcaccgtgttctgcccctgcgtcgtgtcgctgggcaagcacccgccgaccgagggctactgccaggcctgggctggcgtacgcatcgacgaaggccattacggcgatgcagacctttcgggattgaatgtcgggcttgtgctggagattccgggtctcatggcgcgcggcaactggaaggccgccgcctatatcgacgaacgcgccagcgacgcggcctatgaggggctgatcgatgttttctctggaaaagcaagaggtaccaccggtctcttcaaagtgctcgtcagcgaattcctcggcgccgaacgcgcaccggtgctgtttgagactgagggtaagacccggcgtctgatcgtgggcaagcagatccacggcgaagtggttccggtaggtggtgccgacagcgaccaggacatcgtggtgaccaataccgagtattggatgggccccgatatcaccgttgcaaccgccaccaaggggcgtgtgcgcgcctttggtcgtgtctgggattttgacggccgctctgccgagatctgccagatcgattggaaggggccgcgctgacgcgcagcacctacgtgaccgagcggcggtcgcgtcgtgatgcgccgctcgccctcaactcatggtatgaaagggtttgccatgaccgttctgaaacctgccatttccctctctcggcgcctgcgtcgaacccctttttcggagggcgtcgaagccgctggagtcaaaggctacaccgtctacaatcacatgctgctgcccacggtgtttgagagtgtcgaagccgactaccaccacctcaagcgtcatgtgcaagtctgggacgtcgcctgcgaacgccaggtggaactgcgcggccccgacgccggacgcctgatgcagatgctgaccccgcgcgatctgcgtggcatgatgcccggtcaatgttactatgtccccatcgtcgatgagaccggcgggatgctcaatgatcccgtagccgtaaagctcgcagaggatcgttggtggatctccattgcggacagtgatctgttgtactgggtcaaggggatcgcaaacggctggcgccttgatgtgctggtggatgaaccggatgtttcgccgcttgcggtgcagggccccaaggcagaggacttgatggcgcgtgtcttcggcgagactgtgcgcgcgatccggtttttccgctttggcgtctaccagttcgaaggacgcgatctggtggtggcaaggtcgggctactcaaagcagggtgggttcgagatctacgtcgaaggcggcgatcttggcatgccgctctggaaccgtctgtttgaggctggcgcagatctcgaggtgcgtgcgggctgtcccaacctcattgagcggatcgagagcggtcttctgagctacggcaatgatatgaccgacgacaacacaccgcacgaatgcggccttgggcggttctgtaacacccacacggccattgggtgtatcgggcgtgatgcgctgctgcgggtggccaaggaaggcccggtgcagcagatccgcccgatcgagatttccggcgaagcggtgccgccctgtgatcaattctggccgctcgttgcaaatgggcgtcgtgtcggtcgggtctcctcggccacctggtcgccggatcatgccacgaatgttgcgatcggcatggtcaagatgacgcattgggatgcggggacgcagctagaggtggagacaccggatggaatgcgtactgctctggtgcgcgaaaatttctggaattaatgggagagatcaacatgttcaaagcccttgttatgacgcaagacagcgagagcggcaaagccgctgctgaaattcaggatctgacccttgaggatctgccggaaggagaggtcacggtcgccgtctactattccaccgtgaactacaaggatggcctgtgtctcagccccaagggcggcggattggtgcgcaattatccgcatgtgccggggatcgattttgccggcaccgtcgagagctcctctgatgagcgctacgccccgggcgataaggtggtcctgaccggctggcgcgtgggcgaagcccattggggcggctatgcacaaaaggcccgtgtcaaggcggattggctggtgccgctgcccgaagggatcacgccccgtcaggcgatggccgtgggcactgcaggctttactgcgatgctggcggtgatggcgctggaggatcacgggctgaaacccggaacgggaccggttctggtcacaggcgcggccgggggcgttggctccgtggcgacggcgatcctcgccaacctcggttacgaggtggctgccgttaccgggcgtcccgagacagccgactacctccagagcctcggcgcaacccagatcgtgccccgcgaggatctgaacgagaccgtaaaacgcccgctcgaaagcgagacctgggcaggctgtgtcgacgcggtcgggggggatatgctggcgcgcgtgctcgggcagatgaaatacggtgcctcggttgcggccgtggggcttgcgggcggtgcggctctgccggccactgtgattcccttccttctgcgtggtgtgaacctcctcggcatcgattccgtgatgcagccctttgagaaccgccagcgcgcttggcagcgaattgccagcgatctgccgctcgaaaagctcgacgccatgatccagcccgcatcactgaccgacctgccaaaactcggcgccgatattctggccgggcaggtgaaggggcgcgtcgtcgtcgacgtcaacgcctgagaccatgacatccgagttctggcgcggcgcgaagtcgcgccagagcgtttccgggcttgatcttggcgcttggaattgcactgtctttgccaaggctgcaaagggagcatgaaacgcgccatggatatcgaatttgtccgcaaacaatttccggcatttgaacagccctctttgcagggtcaggccttctttgagaatgcaggcggctcttacacctgccggcaggtgatcgaccgcctgtttcgattttacaccgagcataaggtccagccctacgcgccttatgccgcctccgaggcagccggcgccgagatggatgaagcgcgcagtcgtctggcggcgatgctgggtgtctctgcgcaggatctgagcttcggtccttcgacaacccagaatacctatgtgctggcgcaggccttccggggcttcttgaagccgggcgagaagatcatcgttaccaatcaggaccatgaggccaactccggcccgtggcgacgcttggccgacgagggcatcgaggtgctggagtggcagatcgatcctgccaccggccatcttgaaccgagcgcgctggaggatctcttggacgagagcgtgcggctggtctgttttccccattgctccaatgtggtgggcgagatcaatccggtcacggaaatcactgcgctggcccatgctgcgggggcttttgtctgcgttgatggcgtctcttacgcgccgcatggtttgccgaacgtgggtgaactggggccggatatctatttgttctccgcctataaaacctatggccctcatcaagggatcatggtgatcaatcccgctcttgccgagcttttgcccaatcaggcgcactactttaacggggatgttccttacaaacgcttcacccccgccggacccgatcacgcgcaggtcgccgcctgtgcgggaatggtcgactacttcgaggcgctcgccgaacatcacaacgcacctgagatcacaggcacaggggcgggcgcctttgtgcacgatctgatgcgcgagcaggagatctccttgttgcagccgctcctggatgcggtgaaggggcgaaacgatgtgcgcttgcttggccccgcgaacgccaaagagcgtgccccgaccgtcgcgcttgcgcttgggcgggcagcagagcccgttgccaagcaattggcagagcttgggatcatggcggggggcagcgacttttacgcagtgcgtgcgctcagggcaatgggggtcgaccccgcgcagggcgtgctgcggctgagttttactcactataccgatcaattggaggtgacagcgctgatcgaggccctagatcgcgtcctgtaaagactgatcgagcaagggataaaactgaccatggctgacacccgaccggtgatctggtggattcggcgcgacctgcgcctgcgcgacaatccagccctcagggccgcgcaggaggcgggcggaccgattatcccgctctatatccatgacgcgcaagaagaggccctcggggccgcgccaaagttccgccttggcctcgggcttgaacggtttgccaaaacgctcgaggagaaaggcagccgtctcatcgtccgccgtggcgacgcactcgaggtgctgcgcgaggtcatcgcggagagcggcgccggacatgtgatctggtcgcggctctacgatccggcggccacaaaacgtgacgcaaagatcaaggaagcactcaaagcgtctgatataaaggcaaaatccacgggtgggcggctgctattcgaaccttggaccgtcgacaccaaggacggcggcatgtaccgggtatatacgccgttctggaaggcagtccgtacgcgcgatgtcgcggagctgactgccgccccctcccggttggccgcgcccgagagttggccgtcaggtgaagcgctcgcggatcttggcatggatgccgcaatgcgtcggggtggcgcgattgttgcgcaacattgccgtgtgggagaggacgcagccctcgcgcaactggatgatttcctgacggaacgggtttcgaactacaaagcccatcgggattttcccgcccgtgctgccacctcggagctttcggaaaatctcgcctggggggaaatcagcccacatcggatgtggcatctgggcgcgcaggcgatgcaggacggccagcccggcgcggagcatttcctcaaagaggttgtctggcgcgagtttgcctatcacctgatgcatcgctcgccacgcatcctgacgcgaaactggcgagaggaatgggacggtttcccctggcaggacgaccctggcgacgctttgcagcgctggcaacagggacagaccggctatgattttgtcgatgccgcgatgcgagagctctacgtcaccggcaagatgcacaaccgcgctcggatgatcgtggcaagctttcttaccaagcatctgatgatccattggaaatacggattgcagtggttcgaggactgtcttgtcgactgggatcccgcttcgaacgcgatgggctggcagtgggtggcgggttccggtcctgatgcggcgcccttttttcgcattttcaacccggatggtcagctcgagaagttcgaccccaagggagactatgcgcgtcggtggctgcccgaaggccaggccaacccgcccgaaaccgcgatggcatactttgaggcgatcccgcgcaggtggtcgcttcatcccgaccagtcgcgtgtttcaccgattatcggtttgaaagagggccgcgagcgcgcgctttctgcctacaaagaaagccgcaatcagagctgagccacgcggtcgtggcgatgggtacacaggttgtctttggggcggtgtctgctgtgggtttgcgctggatttctgcgcgacctgcgcatagcctcgccgacagtctcgcaattgcaggaaatcaaatccccatgcccaccgccgcccgcctcgtggccgccgttgcccttgctcttctggcgtttgtcgtatccggccagatcatgcccttgatgccggatgacacggattttggctattttacctttgtgaacatggggctgggacttgtgattggctggaagtctatcggtccgcgcgccggtcgcggatgggcggcgggcattacaaacgggatcaccggcactgcggtgctggtgctgtggggcctcttcattcagggcgccgtcgagatgtttcgcctcgcaaagcgcagcatttatgatggcccgttcgaagctttggctgcgatctttaccatcgcgctggagtatttcttcatcatggcggtcccgagtgttctgttgaccctcgctgtggggggaacattgatcggcatggcggtcgagatcgccagcaagcgctggaagtgattcagacctagcggcagtcatggatcatgctgcgcccgcccaagagcgattaaagtcagcacgttccgcaaaaccccacacagcatggacagtgttgtgatgatgcccgccgcggcgcgatggttttgcgggcaagtcagacgcagtggaaccacggtcgcgccgaaatcgtccccgacaggcgaaacgccagcctgcgcgcgctctggacccttgtgatcgcgccggtgcccagctacatcagaggggaacgagcgaaagggaatttcatgcgcattgcacgcgatctggccgatgcggtcggccatacccctctgatccgactgaacaaagtcagcgaagaaaccggttgcgaaattcttggcaaggcggagtttctgaaccccggccaatccgtgaaggaccgcgccgcgctctacatcatcaaggacgctatcgcccgcggggaactcaaacccggcggcacgattgtagaaggtacagcgggcaataccggcattgggcttgcgctggtcggcgcctccatgggcttcaagaccgtgatcgtgatccctgaaacccagtccgaagaaaagaaggacatgctgcgtctggcgggggcacagttggttcaggtgcctgcagcgccttacaagaaccccaacaactatgtgcgctactccgagcgcctggcaaacgagctggccaagacagagccgaatggcgccatctgggccaatcagtttgacaatgtggccaaccgtcaggcccatgtggaaaccaccggtcccgagatctgggagcagacgggcggcaaggtggatggtttcatctgtgctgttggctccggcgggacgcttgccgggattgccgaggcgctgcagcccaagggcgtgaagatcggccttgccgatcccaatggcgccgcgctttattcctactacaccactggcgagctgaagtccgagggctcctcgatcacagaagggatcggtcagggccggatcaccaagaacctcgaggggctcaccccagatttcaactaccagattccggacgcagaggcgctgccttatgtgtttgaccttctgcacgaagaggggctggtgcttggcggatcttccggcgtgaacattgccggcgcagtgcgtctggccaaggaactggggccggggcacaccatcgttaccatcctgtgcgactatggaacgcgctatcagtccaagctctttaatccggaattcctcaaagacaagggcttgccggtccccgactggatgacccatactcctgcttcaattcccggagtattcgaggacatctgaatcagatgacttatttgagaacgctttttcaggtcggccttttggggctgacctgtttgcttttgcctattgttgctttggcgcaggaaaccggcgggcagacccggctgcacgaggcccgcgatctggtgcagaccgccgcttctggcaaattgggcgagtattatgaggcctggcagcgcactgcagatcgtgcagagcgggtgctggatgccggacgcgcgtccaatggcgcgctggaggccctgcggctggagctgacggagtatcgtcagcaatttctcgacgcaggcagccagaatgcggatcgcctgagaactcttcgcgcacagatcgaggcactcgggccaccgcccgaagaaaatggcagcgagcctgaaaacattgccaaactgcggcaggagttgcagagccagcttgccaacctcagcgcgccgcaggtgctggcggatctcggctatagccgggcgcagggtctgattaccgaaatcgacaagctgatccgagaacgcgcaacccgcacgctcttggagcgcgcgccaatgccggtcaatcccgagcactggccgaccgccttctctgacacggcaaaggtgctgggcgcgttctggtacgagaccgcaacccttctgtcgagcgcggccacgcttgaaaccatccggggccgtttgccggtcctgctgctgtttactgccggggcgctgctgctcttggggcgcggacgctactgggcgcgtcgtgcgggcacccatctgcgcgaactcggctggcgcggcacaggcgtctggcggttcatcgtctcgcttctgcaggtgctgttgccctatgtggggacggttcttctggtgcgtgcgatcgatatgtccggtgtgctgggcgtcagggggacattgctgttggatgatgtgccgctgtggtcctttatcctgtttgcttcgcattggctgggcgagcggctttatgtgtatcagatcaccaatgagctcataccctttgagccgcgctttcagcgtcaggtgcgtgtgatccttgtgtcgctggcacttgtgctggtgatgcagatgatgctggatcgtctcgacaccatcgagaatttcaccgatgcgacctatgcggtattgagctggcctctggtcattctcgcttcgctgttcctggtacgtctgaaccgtatccgggtgcgccagcgccgcctcgagatcgaagaaaacggcggcagcgaggatgagggcgccattgcggccggggccaatcgcgccatgtcgcttctgcggcgggcggtgttcatcatggcccttgttgcgccgatccttggggctctgggctatattaacgcagcaatcgcaattgtttacccggtgatcctgacgcttggtctggtcaccaccctgatgatcctgcagcggttcctgtcggatatatacggatatgtcacgcgcaacggtcaaggcgcggaggactcgctctttgcagtgatcaccggctttgtactggccctgctgtcgctgcccttctttgcgctgatctggggcgcgcggacctcggatttgaccgaactctggtcgcgcttcctcgaaggctacagcatcggcgacaccaagatctctccgacgatcttcctgacgtttgtggtgatttttgtctgcggttatgtgctgacccggctcttgcaggggagtctgcgctcgtcactgctgccaaagaccaagattgaccccggtgggcagaacgcgattgtgtccggtgtcggctatatcggcatcttcctgtcggcgctcatcgcggtttctaccgccgggctcgacctgtcgtcgctcgcgattgttgccggtgcgctctcggtcgggatcggctttggcctgcagacgatcgtgtcgaacttcgtgtcgggcatcatcctgttgatcgaacgaccggtctccaagggagattggatcgaggtaggcgggctcatgggctatgtgcgtgacatctctgtgcgctccacccggatcgagacgtttgaccgtaccgatgtgattgtcccgaactcggatctgatctccggcaccgtcacgaactatacccgaggcaatactgttggacgggtgatcgttccggttggcgtggcctatggtaccgatccgcgcaaggtcgaggagatcctcatggaggttgcgcaatcgcatcctatggtcctgatgaacccggcaccttcggtcgtgttccagggctttggggcggatagtctcgactttgagatccgcgccatcctgcgcgatgtgaactgggttctgtcggtgaagtccgacatgaactacgagatcgccaagagatttacggaagaagggatcgagattccctttgcccagcgtgacatctggatccgcaatcccgaggcgatccagaccagcaaagagtcacctcaggccgagacctcgacttcagcaggcgcatcaacgcatgcggctcggctcaaacccgatctcgacgatcttgcgcaggatcaggacgccgacgcagagggcgatggcgacggcgaccgctaggtctgagctcgcctgcaaactgatgccaccagagtgcgccgctgccgggagatcccgcagcggcgctttcttttgtggcgccgagggcaggggggcggacccttaaagactaggcgtgggctggggataattccctcatggtgacagcgacttagggtaaaatcgggggcggcgaaaaaaactgaactttttctcagaaagcctattgcaatcccccccggaatgcatcaaaagtcgcccccacggagaggtggccgagtggtcgaaggcgcacgcctggaaagtgtgtaggcgggaaaccgtctccagggttcgaatccctgtctctccgccataacccccaatcagcattctttcttcaaagatctgcaattcggcagggttctggcgatccgtttggcgtcgaagccagcctatcacacggttcgatcacatgtcgcgcgggaaggcggctgtcgcaaaaatttcataccaatcagcaatctcgggcgtgaactatccgcgctgaggcgataggacctgctgcaaggctctttatgaaaggcaaggatcacatgcggctcgatcacgatattgaaaacgcgctgatttccatggtcagagatgcggcgcgcattgagatcatgccgcggtttcgtaatctctcggcaggggcgatctcggccaagacctcttctatcgatgtggtgaccgttgcggacgtcgcggcagaagaacatatgtcccgcgcggtagagaacattttgcccggcgccgtcgtcatcggcgaagaggctgtctctgctgatccccgcgtgctcgatcaggtgggacaggccgaagtcgcagtgatcgtggacccgattgatgggacgtggaactacgcccatggtctgtcgacatttggggtaattctagcggtgacgctgcgcggacaaactgtgttcggccttttgtatgatccggtgagcgatgactgggtgcagacaagccttggtggtggaacctggatggcggcccccggtcttgaggcacggcgcctgcgcgtcgcccctgaacgcaggttctccgaagccacgggttttgtgccgcatttcgtctttgccaaggaggaacaactggccgtggcgcaaggaatggtgcgcgccaagcgcacaacctccttgttctgttcctgccacgaatatcggatgatggcgcagggccacgtcgattttgtgcagaccgaggggttgaattgctgggaccacgcggcgggcgttctggccgcgcttgaggcggggggacatgcgcagctttcggatgggcgtgcctatgatccggccctcaccacagggcggctcaccgtctccagcggcgaaaccctgacccaagaggcgatttcggaatttggtctcggctgaggcttcaggcttggcggtgcgaggttgctgatctaggctttggtctgcgacaggaggtgccccatggccaaagacgatattgccaacaacaacatcgcagagccgctgatcacgcgacacgatgatgccggcgttgcgcggctcaccctgaaccagccgcgccggatcaacgcgctctcggaggcgatgctccatgcgctgcaggcggcactggatgaaatcgccgaggatcgcagcgtgcgagcggtgatcctcagtggcgctggggatcatttttgcgccggtcacaacctaaaggaaatgaccgaagcgcgcgctggtgacgatggcggctttgagtatttccaacagctttttgcaacctgctcgcggatgatgcagaccattgtggagctgccgcagccggtcattgccgaggtgtcggggatcgcgactgctgcaggctgtcaactggttgccacctgcgatcttgcggtcgcttccgaggatgcgcggtttgcgacctccggggtgacgattggtctgttctgttccacgccgatggtggcgctgacccgcaatctattgcgcaaacatgcgatggagatgctcttgcttggcgaatttatcccggcctcccgtgcggccgagatcggactggtcaaccgcgtggtgccgctttcagatctcgcgcaagaaaccaccgaactggcgcgtcgcatcgccggcaaatccccagccgcgatcaagatcggcaaatcggccttttatgagcaggcgcagatgtcgctggccgaggcctatgcctgcaccggtcgtgccatggccgaaaacatgatggcgcgagatgccgaggcgggtattggcgcatttctctccaaagcccctatgccggattggacaggcgagtagggcgtggcctggttacgtcgagtttgacccgcaggcgtaacgctatgcaatcgcgcgattcgagcactttgtgccacgttcagtgaacaaaggcgtcaaactgtttgaactcgcgcgcgtgtttgcaacaatccagggattgtcgcccgaaggattttcagcaagcgagggggcgcttctggcctgttgttggtttcgacctcggaaacaaagatcgctccggtggcgtcactttggttggccaattggttgggcagtccaatttgcctcaaattatcacataattttcaagatctctgcgcatcgggcccaaggtccttagcccgtttggaaacaatcctgcatccagactcctccgaaactgcccctgaaatcagcggtctggggctcgacgggcctcttagagctaggtgcgatcagggcgctcggctatgtctttacctccagacgcgtgatacaatcacagcgaggatagggtttcctgaatacaacccaaagaaaagacagtggaggagaccacagcatgaacaagacatgcgaacgcacgtctggcgactgtacgggcgagagcaaagcccgcgccgccagcgatcgggtcacgccctgttttacccccggcaccttgattgcgactccgcgcggtgaacgcttggtcgagaaccttcaggtgggggaccgggtgattacccgtgataatggcatccaggaaatccgctggtttggtcacaatgcgatggggccgcaggatctgtcccatgcctcccatctgcaacccatcctgatccggcagggggcccttggcaatgggctgcccgagcgcgacatgatggtgagccccaaccaccgcgttcttgtggcgaacgataaaacggcgctctatttcgaggaccgcgaggttctggtggccgcaaagcacctcaccggtttgactggaattgatgccattgtgacaaccgcagtgacctatattcattttatgttcaatcagcatgaggtcgtgctctctgatggcgcctggaccgagagctttcagccggtggatcagtcattgcgcggtttggacaatgcccagcgcaatgaaatctttgaactgtttcccgaacttcgcaccaaggaagggcaaaaggcctatccctcggcacggcgcgagttgaaggaacgcgaagcgcggatgttgctgcactgatcagacgtcaccttggcgcgcgcgccacttggtccagtcttcgggcgtgtccagatccgtgagcgcatgcgcgcccggcagcgcgatcaactgcaccgcctcctgtttgagaagttcccgcgcgcccgcatcgcccgtgagcgtttgcagcgcatcaaagcatcggcgtggaaacagcacggggtgacctgctcggcgagcgccgctttgatctgtgccgcttgcacgtagaatagccccctctggaccggcaaattgctctgccattttcaggaaatccgcagcagtgatttcgggcatgtcggctggcaacaccatgacaccgtcgatatcgcccgccagagcggtgatgcccgcgcggagcgaggcactcaatccttcgaccgcattcggaaccgcaaccagatgagcctcgcccgcagcactggcgcgcgggtgttcgagatgcggcacagtcacatagacctcacatcccgatgcgcgcgccgcatcgctcagccccgcaaccagggggcggccgttcacctgttccaacaatttgtcacgcccgcgcattcgtgacgatgcgcccgccgccagcaggagaatggccaatttcggcatatgttgtgacgggccagcgttcatctcttgccccatcgagatcaggcgggttgtgtatgcgccagcgcctcttgcagcacctcaagcaccttttcagagggcacatcggcggtgacaaaggccgctccgatgccgcgcgcgaggatgaagcgcagctgaccatccacgaccttcttgtcctgcgccatgagatccagaagctcttgggcggggggaagatcgccgggaatgtccgagaggtctgttttcatgcccatcgccttgaggtgcgcgcgcacgcggctgggatcttcctgactgcagaggccgaggcgggctgagagctcaaaggccaacgcacagccgatcgccacgccttcgccatgcagcaaccggtcgctgtagccggtcgccgcttccagcgcgtgacagaaggtatgaccaaggttcaacagcgcccggtcgccttgttcggtttcgtcgcgggccacgatgtcggctttcatctgaaccgaacgcgccacggcttcgacccgcagcgccatgtcacctgccgccattgccggggcattttcttcgagccagtcaaaaaaggccgcatcgcccaagagcccgtatttcaccacctcaccgtagccggcaagaaaatcgcgctctgtgagcgtgccaagaaccgctgtatcggccagtaccaggctgggctggtggaaggcgccgatcaggttcttgccttgcggagcgttgatgccggttttgcccccgacggaactgtcgacctgcgccagcagggatgtggggatctggacaaaacgaacgccccggcgcagcacggctgcggcaaaacccgccagatcgccgatgacgcccccgccaaaggcaatgacgatgtcgccgcgctcgactttcttgtccaagagccactccaccgcgcgggtgaactggggccagcctttagtggcctcgccgggcggcaaggcaagtgcttccatctcgatgccgtcggctgcgagtcccgcgcgcagagcctcaagatgaagcgcggccacggtctcatccgtgagcacagccactgtcttgcggcgcaggaggggcgcaatacgctggcccgcctgtgcaacaagatcggggccgatcaccacatcataggcgcgcgcgccaaggggaacgtgaacggtttgttccatcagtcaaactccagtacatccggtcgggtgcgcaaggcctccagcacccggtccaccatattgtcgatcgaaacctgcccgtcagagatcaccttgagatccgccatcgcgtaagttggcacccgcgcgtgatacaggtccgagagcgtctggtaagggtcggcggagcgcaaaaggggacgcgtgtcgcgtccttttacgcgtttccacaacacatcaagatcggcttgcaggcagaccgagacgccgatctcggaaatcatggtgcgattgcgctccgcgagaaaagcgccaccgccggtcgacaggacaccgcattcctcttttaggaggcgcgcgatcacctgatgttctttttcacgaaagaacggctcgccatcgcgggcaaagatctcggggatcgacatattcgcggcagactcgatctcatgatcgctgtcgagaaaagggacgtcgaggcgggcagctaaggcgcgcccgactgcggtctttcccgctcccatcatacccaccagcacaatggtcttttttaatcgtcccggcgcgcgagtttctgccgtcgcatcgctgatttggtgattttcgctcattcttctgtgaatgacgtgatattggcaaaaaggccatatataaaactctcaaaacacacaaagaagcaggctccgggacacccatggcacgtttgataaaataccttgctattcttattgtactcgccgcaatcgcactgattgcttatgcgtatgtggggccttggtttggggcggatttctcggcgccctcggaagaagtgcgcaagcctgtggtgctcaatgccgactaagactgcatcgctggcgatcggcgtctttttgcttgcgagcgcgcccggagacgcgcgcgagccgctggccgcgattgactggctcaacagtgcgccgccggttgccaatattccaacgaccctgctccaggaacccccggtcgccaagagcgcctatgggccggacattaccgtgaccccgcttgagcggcttctgccgcctgtggggctggtgccacagtcgcgcaccgggcttccgatcacactctggcagggcagcccgccggaccagcttgcgggtttgatccgtgacgtgccggttcaggatctgccttcgatgcaatccttgctgatgacactgctgctgacggaagcgcgcccgccgtttcgcgacaatgatgaaatcctgctggcgcggctcgaccggctgcgtgatctgggcgcgacggaaccggtgcaggcccttgtgcaagaagcaggccccaccgagagcgctgcacgttttgagcgctggtttgacgcgacgcttttgaatggggatgaggaccgcagctgcgcggcgctgacggccgatccctatttgatgcaggattatccggcgcgcatcttttgcgctgcacgccgtggggattggccaacggcggcattgatgctggaaacagccgatgcgctcgggctccttgagtctgatgatatggcactgctggatcgtttcctgaacccggacatctacgagggcatgccgccgctgccgctgccgcagaacccgaccccgctcgaatttcgcatgttcgaggccatcggcgaacccatgccgacccggtcgttgccacgcgcctttgccagtgcggatctgcgcgatgtggcgggctggaaggcgcagctcgaagcggcagagcgcctgacccgcagtcgcgccatgaatcccaatcaattgcttggcctgtttactcaacgaaagcccgcagcctcgggaggcatttgggatcgtgtcgatgccgtgcaacgctttgacgcggcgcttgggaccggcagtgccgaagcggtgcgcaaaaccctgcctgcgttctgggcggctgcacaggcggcagggcttgagatggcgatggcagatctgtttgcgccgcgtctggccggtatcgtgctcgacggtccggccgcacagatcgcctggcacatgcgtctgctctcggcagagtatgagatcgccgcacagtctccgcccgaccaaagccgcgcgacgcggttcctcgtctccctcgctcaaggcacccctgcgatggatctggcctcgacaccacaggaaaaggcgatcgcccgcggttttgccgcagatagcgagatgccagccgcccagaaactgttgcttgaccgggcccgcttgggggaggccatcctggtgaccatgaagagctttagccacggtgccgacggcaatatcgaggcaatcaccttgtcactcgcggcgtttcggcggatgggtcttgaagacagcgcccgccgcgcagcgctgcagctcctgttgttgccgcgaggaagctgaaccatgctggcacccgcggacgatctgcaatggatttcgacctttctcgatgcgcaggccgcagaactcggtgcagcgcgcaacacgctgctggcttacgggcgggaccttcggaatgtcaccacctggatgcgcaccaaagggcagagctttgcgcagatgcaacaggctgacatcgaggcctatctgatctcatgcgatgccgaggggctgagccgcgccacgcgtgcacgccgcttgtccgcgatcaagcagatttaccgttttgcttttgaagaaggatggcggcaggacaaccctgccttgcagatcaaaggaccggggcgcgacaaatcactgcccaagacccttgatgaggcagaagttgatcgcctccttgctgccgcgcgcgaagtcgggcgaaccgaggccgacaggttgcgcaacacctgcctgatggagcttttgtacgcgacgggcatgcgggtgagcgagctggtctcgttgccggtgtccgccacccgaggtgatcccaacatgctgttgatcctcggcaaaggtggaaaagaacgtatggtcccactgtcgccacccgcccgcgcggcgctgggggcgtggatcgtgctgcgcgacagtcttgaggacaagcgcgaagggcaggggcacaaggcatcgcgctttctctttccctcgcgcagtaaagagggccatcttacgcggcaccggttttatctcctgatcaaagaactggcggtcgcaggcggcgtctcgcccgaaaaggtcacaccgcatactctgcgtcatgcctttgccacgcatctgttgcaaaacggtgcagacctcagggcgattcaggcgctcttggggcatgcggatattgcgacaaccgagatctacacccatgtgctggatgcgcggctggcggagttggtacaccagcatcacccgcttgcggcaaaagacgacgaaactcgttgatttcggggggcgcgccgcttgaaccacggcgctctgcaccccataaccactgaaaccccacatcaatcaggaccctaaaatggacagcgctacagccgcacttgacacttccttctggattaccgccgggggcattgttttgttgttggttctctccgggttcttttcgggatccgagaccgctttgacggcagcctcacgcggcaagctgcgcagccaggccgacaagggatcgcgcggcgccgcgcgcgcactcgaagtcaccgaggacaatgagaagctgatcggttcggttcttctgggcaacaacctcgtgaacatccttgccgcctcgcttgcgacggcgcttttcaccaaactctttggagagagcggcgtggcgctcgccacgctcgtcatgacgcttctggtgttgatctttgcagaggtgctgcccaagacctatgcgatcaccaactccgagaaggctgcggccgcggtcgcgccgatcatcggctcgctggtgaaaatcctggccccgatcgtgggcgcggtgcgctttctcgtgcgcggtgtgctgcgggtctttggtgtaaaaatcgatcccgacagccacatcatggcggtgcgcgaggaaatcgtgggcgcgcttcagatcggccattccgaaggtgtggtcgagaaagaagaccgcgaccgtatcctgggggcgcttgatctctctgaccgctttgtcgaagagatcatgctccaccgttcaaagatcgaaatgattgacgcggaggccgatcccgaggcgattctggagcaatgtctgacgtcctcgcacacgcgtctgccgctctatcgcaaggatcaggaaaacattatcggcgtggtgcatgccaaggacctgctgcggcagatgtatgccaagatcggtggcgcggatggggatgcctctgcgctgcgtgattttcagatcaccgaggtctgcaagccgccctattttgtgcccgaaaccacgacgcttgatgaccagatgcgccagtttctgcgcatgcggacgcattttgcgctggtggtggatgaatatggctcgctgcaggggctgatcacgcttgaggatattctcgaagagatcgtgggcgagatcaccgatgaattcgaccccgccgagcagagttttgcgcgcaagaccagtgatgggaatttcatcgtcgaaggggcgaccacgatccgcgatctcaatcgtgcgatggattggaacctgccggatcttgaggcaaacactgttgcaggcctggttatccatgaggcacagatgatcccaacggtggggcaggtgttctctttccacgggttccggttcgaagtgacggcccgcgaaggcaatcgcgtgacgcggctgaagatccgccccctgcacggctgacaccgcaacctcagtgagtttgtgcctgtgtttcgctttgggcgccgcgcttcgtacaagatgaatggtttctttgtggcagagtgcgttgggtccgtggggcgacgattaggctattgtgcgacatcggcggtcgttttttgactggactaatgaacacatgtgtccagaatgggggaaatcggtcctgacagggagataaacccatgaaaaccaccacgcgtgtggcgattatcggcggtggcgttgttggctgttccgtcctctatcatctgacaaaacttggctggtccgatgtgatgctgatcgagcggtccgagcttacctcgggctcgacctggcacgccgccggtggctttcacacgctcaacggcgacaccaatatggcggcgcttcagggctataccatcaagctctacaaagagctcgaggccatcaccggcatgtcgtgcggcctgcaccatgtgggcggcgtgacccttgcggagacgcaagagcgatttgacatgttgaaggcagaacgtgccaaacatcgctttatgggacttgagacagagatcgtaagccccgaagaaatcaagaaaatcgcgcctgtcacgaatattgatgggatcattggcggcctctatgatccgctcgacggccacctggacccctccggtaccacgcatgcctatgccaaggccgcgcggttgggcggcgccacgatcgagacccattgcaaggtgatcgagaccaatcaacgccctgacggaagctgggacgtggtcacggaaaaaggcaccatccacgccgagcacatcgtcaatgcaggtgggctctgggcgcgcgaagtgggggcaatggcgggcatctattttccgctgcacccgatggagcaccagtatatcgtcaccgacgaggtgccgcttatcaaggagatcgttgaggcgggcggcgagcatccgcatgtgatggatcccgctggtgaaagctatctgcgtcaagagggtcgcgggctctgtatcggtttctatgaacaaccctgccggccgtgggcggttgacggaaccccgtggaactttggtcatgaactcctgccggatgacttcgacaagatcgaagacagtattgattttgcgtataaacgtttcccagcgctggccgaggctggggtgaagtccgtgatccacggcccctttacctttgcgccagatggcaatcctctggtggggccggttccgggcgtgcgcaattactggtcggcctgcgccgtgatggccgggttcagccagggcggcggtgtcgggttgatgcttgcgcaatggatggtcgatggcgagtgcgaacgcgacaccgcagccatggatgtggcgcgctatggcgattggatcacccccggctacacgcgccccaaagtggtcgagaactatcagaaacgcttctcgatttcttatccgaacgaagaactgcctgccgcgcgccccttccgcacaacgccaatgtacgacatctttgatgagatgggcgctgtctgggggcaccaatatggcatggaggtgcccaactattttgccgccgagggcgaggcgcggttcgaaacgccctccttccgccgctccaacgcctttgaggccaccgcccgcgaggtgaaagccgtgcgagaaggcattggaatcaatgagattcacaactttggcaaatatcgcatcacaggcagcggtgcgcgcgcctggctcgatcgcatcatggcgggccgcgtgccgcaacagggccgtctgagcctcacgccgatgctctcacccaagggacgcctgatcggggatttcacgatttcctgcctctcggagggggagttccagttgacggcgtcatacggtgcgcaggcctatcacatgcgctggttcctgcaaaatctcgatgcgaatgtttccatcgagaatgtgtcggatcaagtgaatggctttcagatcgcagggccaaaggcggcagcggtgctgcaggcctgcacgcggaccgatatctccgacatgcgctttctagatgtgcgtcgcctgacggtcgggatggtggactgcgtggtgcagcgggtcagctacacgggtgatcttgggtatgaaatttactgcgacctgccgagccagcgtgcactctggacgaccctctggtgtgaaggtcagggccacgggatgaagccctttggcatgcgggccatgatgtctttgcgcttggacaagttctttggatcttggctgtcggagttttcgccggattacacggcggcagagaccggtctcgatcgctttatctccttcaagaaacccgttgaatttattgggagatccgctgccgaagccgagcgggaaaccggggcggagcgaaagctctgcgcgtttgaggtcgacgccgaagacgccgatgtggttgcctatgagccgatctggctcgatggagacgtcgtggggttctgcacctcaggtggttacagccattttgcgcagaaatccatcgcgcttggttttgttccggttgagcgcgcaacagaaggtctcgaggtggagatcgagatcctcggcaagaaacagcgcgcgcggttgatcaccgagcccctgttcgacgcggatggcgcccgtatgcgcggctaaggatgcgccggtaacgtattgatttaaagaagaaggcccgacgtctgtcgggccttcttgttcctggcgagatttgtatctcgcggagcgtttccaaaacgcgcgacgatcagaacgggatttcgtcgtcgtcgatgttttgcgaggggccaccgccgccaaagccaccgccctggttgccaccgccgccgccatagctgccgccaccaccgtagccgcccccgccgccaccgtagtcgccgccgccctgaccaccgccaaagccgccaccgccgccttcgccacgaccgtcgagcatggtgagtgtggagccaaagccctgcagcacaacctcagtagaatagcgatcctggccgctctggtcttgccacttgcgggtctgcagctgaccttcgacatagaccttggaccctttgcgcagatattgctctgccacacgcaccagaccttcgttgaagatcgcaaccgagtgccactcggtcttctcgcggcgctcgccggtgttgcggtctttccaggtttcggaggtcgcaatccgcaggttgcagaccttgccaccgttctggaagctgcgcacctcggggtcgcggccaaggttgccgatcaacattactttgttcagggatccggccatgggggtcctgtcctttgttttcttatctatttcggagcgagtgcgaggcatcgccagagcgtgatgtcgaatcccgctcgctgtctgcgggtcagagtaacgagcctgaccgcgcgatgaaagagcgccggacgcgggaaagggcggtctgcgcgtgatttccacaggagtttgcgcagagtttcgcaactgggaggacacttctgcggtgcttatctttcattttaaggattgaggcgctatattcccgccatctgaaccgaagagttttcgatttcacacatgcgacgtatttcgactgctgctctcatcgtgacctgccttgctacacctgtcgtggctagtgatctgttcagcaacagctccaagcgtaaggtgtttgctgcccagaccaagtttctggatacccgcggggcgacccaatatcgcggctcggagcggttgaaacccgacagtcttcaagatgacgtgctgccggtctatcgcggcagctatcgcggggagtatctggaggtggcgcgcagcgctgcgcgtgcaaacggtgtgccagaggatctctttttgcgattggtgcagcaggagagcaactggaaccccaccgccgagtcccacaagggcgcgcttggtttggcgcagttgatgccgcagaccgcccgtactctgggcgtggatccgttggtcccggctgaaaacctgaggggcggcgccaagtatctggcgcagcagtaccgcaagttcggctcttggcgacttgcgctggcggcttataacgctggacctgaggcggtcacacgccatggcggcgtgccgccctacaaggaaacccaaaattacgtgcgcaagatcctcggtagctaatcgtgcctttggagttggttgtggcgggtttctgtccgtcccttgacgggggcgttaatacaattttcagcatcgttaaccaatttgccgcgcccctatcgttaaccggtcattaatctgccttaatcagacgtaaatctctccctcaacacggagggacattcagtgagtgggaaaacgtttgaaggacagctgacacggatcgggtgggagcccggtgcgcggccgcgtcccgaactggtggacgacatcctcgattatcatggtcgcggtgggcgtcgtgacatcggcccgacgcttctgggcgttgcctttggcgcacttctggggctgctgctcaagggcatggcgctggatgggtcgccttggggcgcgggaacggggctctttggggacgtcatcggcgccattgcgctgtgcggatttctgggcgcggtgctggttgcgttcttggcggcgctgcgcgcaaagtcccaaccagagctattgcagtttgcatcgatcaacctgctgacgctgttgatcgtttatatggtctgagtttgaccacgagataccctcgggtgggactgtggggttgaaagggcgcggcgcatagggctgcgtcctttctgcatctggaagttgtggcggcgctgcgctagaccgctgcacagaccccggagatcgcgatgttcaaactcttacgccatgcttcctgccttatactatgtgccgcgccattggttgcagccccctatcagacagctgaggatcttggggaggcgctgttctttgagacggatctgtctttgaaccgcagtcagtcctgtgccacatgccatgatcccgctgcgggcttcgtcgatcccagaggtgacgccgaaggcgcgttttcccgtggagacgatggcgtgtcgcttggggggcgtcacgcacccaccgcagcctatgcgtctttgtcgcctgcctttcatcagaatgacgcgggcgagtgggtggggggccagttctgggatggccgtgccgctgatttggcagagcaggccggagggccgatcctgaaccccatcgaactggggctttcaagccaagcggaggccatcgctcgactggccgcacatccagagtatgtcgagagttttcagacgctctatagtgtcgacatcaccacagatacggaggcggggttcaaggcgctgacccaagcgcttgccgcctttgagagcagtgacgtctttcagcctttcgacagcaagtacgaccgcttcttgcgcggggatgtcgagttgagcagcgaagaggagttaggccgtctcttgttcttttcggagcagttcaccaactgcaaccaatgccaccagttgcgccgcagcgcgattgatcccgcagagccgtttagcgattttcgctatcacaacatcggtgttcccgcgaatgtggcgggtcgccttgaaaacggggtggcagaggattgggtggacgccgggctttatgagaaccccagcgttctggatcgcgcggagcgcggcaagtttaagacacccacgctgcgaaatgtggccgtgacggggccctatatgcacaatggggtgtttcaggatctgcgcaccgttgtgctgttttacaatcgctacaacagcaaggccgcatctgcacagatcaaccccgagaccggtgcgccctggggagagatcccggtgccggacacattggcgcaaaaggagctgacccatgggccggcactggatgatcgtcgggtggatgcgctggttgcttttctcaaaacgctgaccgattcccgttacgagcccctcctgcaggagtagaaaggcgggcgtttagggattgggcgttaaattccaagaaaaagacacaatttcgaaccaagcgctttaccggggattcacttctgtcccgcaacttcggcccatcgttacagaagggcgaacaacacatgctggtagaaaacagccatactcccgatgccttggctgaggcatttgcaaccgtcgacggtcttatggccacgggcaaatttgcacgctctctcagcgtgatgctgccttttgttcaaacaggtgagctggatgctggcctgctggatcgcaccgccgattgcttctttgaaatgcgtgactacgagaatgcggtaaacgtcatgcgccatgtcactgcaacctggcccgatgatccctccgcatggggcaagcttggcctgatgctgcaaaccaagggtgatctccttggtgccgagcaggcctttgaggaagtgctgaagcgcgatcccaattcgatcccggcgctgactgcgctcaacgggattgagacattttccgtcgacagcctctatgcccagcgcctgatgtcgctctccgagcgtgaggatctggatgccaaacaccgtgccttgatccactatgcgctggcccagatcgcccatgggtcgggcgaggcagaggtcgcatttacgctgttccaatctgcgcgcaacgaggtggccggtccttttgcgcctgcgattttcgacgagatggtcgccgagcaagaagccttgtttgaaccgcgcccggcctctgaggatgcgtcgctgctgcccaaactggtctttatcggcggtatgccgatgtctggcaccggtctggtggatcgaattctcgcacagcaccctggcgtgttcagtgttggcgcaaaaacggcgctctcgcgcacccatggtgccatccgcatgcatctcgccaagaccgaccgtccctgcaactactgggattggatggagcatctgagcgcagaagaaatcgacatcttccgtcagtactacctcgagcgcgccctcggcggtcaggtggctggtggcaagaccattgttgacgcgcatccgctgggatgtctggaattcggccttgcacaattcctcttccccgaggccaaatttgtcttcatgtcgcgtcacccgatggacacggcgctggccaatatcgcgtccaacgtgctgaacggcaatgcgctggcatcgcgtaccgaatggatcgcgcaggtgatgcgcacggtctattcctcggcaaccgtctatgcttccaaacttggcgacagcatgcgcctgcagtcctacgaggcgctggtgcaaaactccgagcgtgaaatcggcctcctcttggagcatgcgggtcttgaatacaacgccgcatgcctcacaccaaatgcgctctgtgacgtgccgcagattgcgaccatgcttggtcaggaagagctctcgactgagacgcagaaccagtggctcccctatgaggagcagctgcaggggttctacgagcaactgggcggcgaacgctgggtctctgcttgggaagatttcgacaagacgctgcgctgatccctgacgcggtcacggccagcgacagaagtcctgtccgacaaatgccataggatttggcaatctcagcggccttcccaatcgggaaggccgctttgttttcaaacgggcaaaggcatcactccgccgcgatcttgatgaccggctccatactctccagaacttcgccgctcagatggcatttgatctggtgcccgttttcaagggtctggatgggcggcacctcagcctcgcagaggccacctggaaccttcgatttccaacggcaacgagtctgaaacgggcacccggagggcgggttcatggccgaagggatatccccctcaagcacgatatgggtcttttcgaccgatgtgtccgcgattggcacagcagacaacagcgcctcggtataggggtgatagggcggtgagaacacctgctcggtttcgccaagctcgaccacatgaccgagatacatcaccatcacccgatcgctgagatagcgcacaatcgagagatcgtgactgataaagagcagggtcgtcttctcattgcgctggatctccatcaggagatcggtcacagcagcctgcaccgacacatccagcgccgagacgggttcatccgcaaccacgatccgcgcgcccccggcaaaggcacgggcaataccaacccgctgtttctgcccgcccgagagctgtcgcggcatccggtcggcaaaggcacgtggcagcttcaccagatccagaagttcgagcatgcgctgctttcttgcgccatcgctgtcaccgatgccaaagatctccagcgcccggatgatctgccgcccgaccgtcatcgaaggattgagcgtgtcgaaggggttctggaacaccatttgcacatcggaaatggtctttgcatcccgcgcctcgatcggcacgtcctcgatgttgcggtcgtccagaaggatctcgccctcggtcgctgtttccagccccatcagtaccttggcaaatgtggatttaccgcagccggactcgcccacgatggcaagcgtctcggattcgcgcgcctcaaagctcagtgtctcattggctttgacaacctttcgcgcgccgcccccaaacagcgcattggccgcgacctcgtaatatttcttgagcttgtccatcttgagcacaacccgcccgggctctgtcttgctggtttgctccgccagagcgagcggtgcgttccagtcgatttcttcaaagcgcagacagcgggtatggtggcgttcattgcccggcaccgccgccattgcgatgtcgcttgcatcacagcgcccggcttcgaaatagtcacagcgtgggccaaagttgcagccgcgcgggcgttcatggggcaggggaaagttgccggggatcgccaccagcggacgcgcgttcttgtcggcgcccggcaggggaattgagcggaacaaggcctgcgtgtaggggtggcgcatgtggtcaaagacatcctcaatcgacccgcgctccaccgcctcaccggaatacatcacgcaaatcctgtcacaagtctcaagaacaagcccgaggttgtgcgagataaacagcattgaggtgccgtatttcttgcccagatccttgaccagttcgaccacggcggcctcaacagttacatcaagtgcggtggtaggctcatcgaggatcaagagtgcaggcttggacatcagtgccattgcaatgacgatccgctgctgctgcccgcccgagagctgatgcggataggaattcagcatccgcttgggatccggcagttttacatccgtgaccacctcgagcgcgcgatcataggcctctttctcgctgacaccctcatgaatcatcggcacttccatcagttgcttgccgattttcatcgccggattgagcgaggccatcggctcctgatagatcatcgcgatctcgttgccgcgcacatctcgcagctcctcggcgctcatctccgcgagatcacggcccttgaacttgatcgaaccaccgacgatgcgcccgttcttgcccagatcctgcatgacgcccaacgccacggtggatttgccgcagccggattctccgaccagcccaaccgcttcgcccggttgcacggcgaccgaaaagtccatcaccgctggaatctcgcgcagccttgtaaaaaatgagatcgacagcttgtcgatttcaaggatcgggccgtcatagtctgcgagtttgctcattttgctctccctgacgggtcagccgagacctcaaagcctcttctaacccaaaatatcccgggggtccgggggcagcgcccccggccgtgttctcatcagtcccgaaggctctcttcacgcaatccatctgccagcaggttgagcccaagaacaaggctcatcagggcaatggcgggcggcagggcggggtgcagatagatcgacaacagcttgcgtccatcattgatggtggagccccaatcggggctttccggcggcaggccaaggccaaaaaatccaagtgttcccagtaggatggtggtgtacccaatgcgcaggcagaaatcgacgatcaatggaccgcggacattgggcaggatctcccacagcatgatgtaccaggggcgctcaccacgggtctgcgcggcagcgacgtagtcgcgggtcttgatgtccagcgcaaggccacgcacgatccgaaacaccgtgggggagttcacaaacaccaccgagacaaacaccaccagcacccccccgggaatgtcaaagaaatccagcggccaaaacgcgattttggaaccttcggcgttgatgagcgacatgtacatcaggaccatcggaaccagaaccaacgccagccagaaagcgttcttgctgggctgtgtgcgaaatcttgagtggatcaagaccccgcaaaacaccattggaaaggcaaagagcaccaccgccatatactgcggcaggcctgtcgcaacgatctcgggcgtcaccagaaggtagaacagcaggatcaccggaaaggccagaatgaggttggcaaggaaggacaggaacgtatcgagcttgccaccgtaatagcctgccggaagccccaatgtgatcccaaccataaaggcaaaaagcgttgccagaggcgcgtacttcaatacctcccacgcccctttgaccatgcgagagaacacgtcccgtgcaaggttgtctccaccgagaagataccaggcatattctccgtcttccacgctgcgcaacggagtgccggggactttgtttttcatgccggagacctgcgccagcgggtcatgggtggcgataaggtccatcgcaccaaagacgccggtgaagacccagaacatcacgaggccaaacccgatcatgccgatggggctgtcaaagagcttgccatagagcccaaggcgtctcttgaacttgatcgacagcgagaacagcaagagcagcgcgacccaggtgggccacatctgctgtgaaattgctccgatgatccccgcacccgtgcccatgatcaggcccaggacgagataggcgagtgcgatcgccgcgaccgcgccgaatgtggcgcgcaccgccagcgcggccatcgcctgcggattgcctgcaagagagaggctgccatcggcatttgccacatagcgtgtgcccgcgctcattgcggacgccaacatccagatcacaatgctcgccgccagcaggatgagcgcgatcaccaggatcggtgtgagaaagccaagagcgccagtccaagtcaaagggtccatgaaaagcctcctgccttacgagatacggatacgggggttcaagaagatgtagccgatgtcggaaatcagctgcgtcaacagaaccacgatgacggagacgaccgaaatcgccagcagaagctcgatgtcgttgttgctggccgcctcgaccagtgcccagccgaagcccttgtagttaaacaaggtttcgacaatcacgactccgttcaacaaccaggggaactgcagcatgattaccgtgaagggggcaatcaacgcattgcgcagcgcgtggcgcagaacgatgtttggaaaactcacccccttaaggcgtgcagtccggatgtattgggccgtcatcacttcggtcatggaggcgcgtgtcatccgggcgatatagcccatgccatagagcgcgatggtcagtaccggcaggaagaaattctcaaacgtcgggttctccatggcagcggttgcggtgcctttgaaccatttgagccccactgtggaggaggcaaagaccgcaatgaagatcacgcccgacacatattccggcgtcgcggtcgtcatgatcgacacggtcgacagggacctgtcggttgccgaaccttcgcgcatcccggccagaacgcccacgatcagggccgagggcaccatgaggatcaaaacccacatcatcagatagccggtgttgcccagccgggtctggatgatttcgctcacgtctgttttgaaacgtgtggaatagccccagtcgccttgcagaatgccacaaaaccgcgcggcctgcgcggcttcttccggggtgacggttccatcaatgcaacgcccggtgacgccttcctcgccgctgcgctgccaaccgggaaccacgcccagccactggccgtatttcaacagcatcggctgaccgtagccattcttatcaagccagcttgcaaccgcttcgtccgacatgcggaagttgccttcggtcttggcgagtttttcgaggtttggatagagattggtcatcacgaagacgatgaacgtcaggcacaaagccgtaatgatcatcacacccgtgcggcgcaatatgaatggtcccatgtgttcccctgcagactggcggtcagctggccctgagacatttggacgtgggtcgtccaaatcgcggaggcctttattgttttgaattcaggcgtggtgcgttgggcctgcccccaatccggtccgaaaaacggattggggacaggcctttaggtaaagggggcgcgatcaggcagcccagccccatttgtagtgatggtgctcgtaggagatatgcatatcggcaccgcgcacgccttcgcgcatgtgacggaacagggatttccaatagggctggatggtgacaccctcgtcctggatcatcttctgacctttggcgacgacttcgcggcgcgcgtcggcatcggcgatggcaagcgcgtcggccaggatctggtcgaactcggggttggaccagccgaattcgttccaggcctcacctgaacggtaggccagcgcccagatctgaacacccaagggacggtggttccagttggtcgagctgaacggatatttggtccagtcattccagaaggtcgatcccggcagcacggtccgcttgaccttgaaccccgcgtcacgcagctgggcagcgaccgcatcggtggtgttcttgcgccagtcatcgtcgatggagaagagctcatgttcgaaatccatcatgccggcttcttccatcagcgcgcgggcgccatcgggatcagccgcctctttagggagctcggcatattcaggatgcgccgggccgacgtgatggttttccgcagcaacaccgcggttgccatagccaagctccaggcagacatcattgtccaccgccatctgcagcgccttgcgcacgcgtttgtcggcatagggggacatgccgtccacctcggccagctggttgggacgcacgacgatggttgccatggtgacaacttcggatttcacgaagccaagcgagtccatcaagtcgatgaattcgccaacggattcatagagcatatcgacttcttcggattccagcgctgccagccacgacgacggatcggtgccgaaatcgatgtattcgatgctgtcgagcgccggcttgccgtagatcgcttcaccccaccagctgtggttctcattgcgcgtgagcacgcatttgacgccgacttcgagctcggaaatcagatagggaccggtgcccacggcgttttgcgcatcatccgcgctaaagctcgcatgggtgatcgctgccggataatccgccatgcccggaatgatggaaatgtcggagttaggcagtttcagtttcacggtgtggctgtctaccacctcgatcgcgccctcgatggctttgccggtgtcgggatcgacaagcgtggcaaagcggccagccatggagttgccttccatgtccttgtcgcaccaaccttcgatgttgcgggccacatcttcggcggtaaagtcgtcgccgttgttccatttgacgcccttgcgaacgttcagggtgtattcatcggcgctgtcattcacctgccagctctccaggagcatcggggtgaaggagccgtcgttgttgtattcaaccaggtattcaagcgtgccacgcgcctggttgccgatttcggaccagtcgaaggtgcggggatccttgaggccgcgcacgctcatttgcacgcgcagggtgccgccttctttcatgttgtccgccgcacgggcaggggcgctcaggccgatcatcccataggcggcggtggccgagacaccaagcgctgtcgcacgggtcaggaactcgcggcgcgagatcttgcccgccttcagttcctgcgcatgcatctcagccgcccaatgatgggtcgtcgagctcttgagtttggtggtggtcatatatttctccctgtactagagcgtcgttgggcggcgaccttcccatgaggcggcggtgcgatctgcggtcgatccaaaaggcacgcatcatacggaggtgtttgatttgtcatatggttccccaacatcactatacggcaccagttgggcggacaggtcaatgcacagtatcggcattaaaatgtctaaatgcgacattatcagcgtcgcttttgataaaaggacacttgtgtctagaaactgggcgttctgaggcgattcagggattccgaccagaggcaagctgagcgccatgtgccttcttgcgcagatcgcttggggtgctgcccgtgtgctgggtaataaaacgggtgaaataggcggcgcttccgaaaccgagactttgcgcaatgtcgcgcattggcaaacgtgtcgaggcgaggaggctccgcgccgcgtgtaactgccgctcggtgagcagcgctgcggcggtctttccggtctcctgcttgcaaacgcgtgtcagatgcgtcggtgtcacgccaagctctgacgcatggcccgccatgttaaacgccccttcggcgtcttgcgccagccgcgcacaataggcgcggcagagcctgcgcgcggccgtgggttttcggttctcgggcgctctgacccaaagccgttgcaggtggatgcccaccagatcagcatagctcgtgatagctttggcggtgtggtcatccgcgacctgctgctcgcgcaaggccgcgtcaaagagcgcattgatccgcccctgctcctgcatgtcgtttatgcggatctgcatcggggtttcaggaaggccgcaggggatgtcttcgccgatgcgcaggacttgcccaatgcattgtcggcccaactcgagcgagaacaatgttcgcgctggtatgcacagggccgtatgaggaccaaagccgcgacactgcccatccaacaacacgcggccttgaccgcgggtgatccagatcaccagatggcagtcgcgctcgtgggccaattcaacctgccaggaccctgcggacatcagctgcaaaagcggtcgtacgtccagcggtccacggatcttggggtcaaatggcattatgagcagtcttaaattcctagcgtgatcggcccgagagtgacgcctgcggctgattcgatcaaattctttgcaggatttggccagagcaggcggaaaagagcaggcggaaaagtgtgcgccgggctgctgaattctgtgcaagctttggatcacgccgcgcgaaagcgggttcagattgtctaggctcagatcatgcctgcggcgagaccctctgccaagatttcattcgggcgcggaaccaagtgcgctgccgcttggcatattgccgggtcgcaactgaggcgcgttcctctgcttgctctagggtgagtgcgccactcagatgcgccatcagctccgggacgccgatcgctttgcaggagggaagcgcgggatcatacctgtcctgcatggcgcgcgcctcctcgagcgcgccttgggcaatcatcatagaaaaccgacgccgaatgcgcgtttcgagccagtcgcgctctgcttcgaccaccagcgcggtgcaatccttggcaggcaagagcggtggcggcgtgtcatcctgccattcggcgagcgggcgtccggtggcgcgcaatacctcccaggcgcgttgcacacgcgcgcggttctgcatgtcgatgcgggcgcgcgtctctggatcgagatctgcggcgagcgtttcgagcgacagagtatccgcttcggcgcgcacttcgggcggggttgcgggaatatctgccatcccctctgtgagtgtcagaaaataaagcccggtgcccccaacaatgatggggcgcttcgtgcccttcaagagcggtgtgacatcgcgcagccagtgcccggcggaataaagtgtgtcatagctcagatgaccataaagcgcgtgcgctgcgcgggattcgtcttctgccgaggggcgcgcggtcacaacccgccagcagtcatagacctggcttgcgtcggcattgacgatcacgccaccgctgtgttcggcgatgcgcagcgccagctcggatttgccagatgcggttggaccggcaatcagcacgggctgatcagctgggattttatcaatatccaacaaggttttgccctgcgcctttgcttgccgttgccgcgatgaggtcgctctacttaagaagatcggcaattatccggctggccggattgatcctcggcgggttttgcttcattttgccgcgagttttaaccccgacatatcgcggagcgcaacatgccccagagcccagagcagccggacgtctcatcgaccgtaagttataaccgtgtgatgctgaaaatttccggcgaggcccttatgggaacgcaagggtttggtctgcatccgccgaccgtgcgcagaatcgccgaagaagtgaaatctgtgcatgatctcggcgtcgagatttgcatggtgatcgggggtggcaacatctttcgcgggctttcgggctcggcacaggggatggagcggaccaccgctgactacatggggatgctcgcaaccgtgatgaacgcgctggggatgcagtccgcgctagaggatctcggggtgtttacccgcgtgatctcggccatccgcatggatgaggtcgcagagccctacatccgccgccgcgccgtgcgccacctggaaaagaaacgggtctgcatttttgccgcgggcaccggcaacccctatttcaccaccgataccgccgcgaccctgcgcgccaatgagatgaattgcgaagcgatctttatgggcaagaacggggtggacggggtctatgacaaggaccccaaaaccaacgaggacgccaagcgctatgacagcgtgagctatgacgatgtactcgccaaacgcctgaaggtcatggacgcctcggccatcgcgctggcgcgggacaacaacctgccgttgattgtctttggcctggacgagcctggcggattccgcggcgtgcttgcgggcgagggcacctataccaaggtacacggttaaaccggcatcgggcgagaacttgcagcacgcgccaaccgcagaggcgcgtgttttgcgtgcaatttcaccaagttccgaaggtttcgcgggtgtttgtccgccgagatcgctatacaatctatacatgatggcgtaagagccatcctcaagaccgcctcaagcaaggggagagcagaatgtctgaagagtttgaactggacaccgatgatctgaaacgccgcatggacggcgcgatggcgaatctcaaaacagaattcgcgtcgctgcgcaccggtcgcgcctccgcgtcgatgctggaaccggtgatggtggatgcctacgggtcgatgactccgatcaaccaagtgggcaccgtgaacgtgcccgagccgcgtatggtgaccatcaatgtctgggacaagggtctcgttggcaaagttgaaaaagcgatccgcgagtcgggcctcggtatcaacccgcagcttaatggcaccatcatcatgctgccgatccccgagttgaacgaggaacgccgccgcgagttgaccaaggttgccggccaatatgccgaacacgcccgcgtgtcgatccgcaatgtgcgccgcgacgggatggatcagatcaagaaagccaaagccgacggcatgtccgaggacgaccagaaattctgggagaccgaggttcaggaactgaccgacaagatgatcaaggccgtggacgctgcgctggagaccaagcaagccgaaatcatgcaggtttgatcagctcagatgtcactcgtcacagatagcgcaacgccgcgtgcggctggtgcgggagatcctgcaccgggcgttggtgacgggccgaaacatgtagcgatcatcatggatggcaacggccgctgggcgcaggcgcgcgggcggccacggctgttcgggcatcatgcgggcgcgcggcgcgtgcgcgaagtggtggaatgctgtccgtcgcttgggatcaagtatctcacgatttttgccttctcgactgaaaactggaaacgcacacaggtcgaggtcgcaggcctgatgagcttgttccggcgctatatctccaaggaaatgaaggcgctggcggcaaagaatgtgcgcgttcgtttcatcggagaccgcgtgcggctcgacaccaaactggtgcagctgatggatgcgctcgagctcgagaccgcaggcaatgacggcactcacctcaccattgcgctgaattacggcgggcgggatgaggtggcacgcgcaactcagcgtctggcacaggatgttgcggatgggcggctggaccccagggacgtcgatgaagaaaccctgccgcgctatctcgacacccatgtgctgccggatccggatctggtgatccgtacctcaggtgaggcgcggatctcgaatttcttgctgtggcagtccgcctattctgaatacgagttcatcgacacgctgtggcccgatttttcatccgaagaactggcgcgcctgtgtcgtaacttcggcaatcgagacagacggttcggggccaccaagaaatgaaaacacctcttagcgcgcatgcctccaaggcgaaccgttgggccgatctcggaccgcgcactgcctctgcggttgtgctggccctgttgggcggcgctgcgatttatctcggcaaccttgcgtttgccctgtttgtgtccctgagcgtgggcgcggttttctgggaagtcacccggatgtatcgtaccgatgggagcctccttgcgcttggctttggcgcgctggctgcagctgcggtgtgcgttgcgtcaatcgtgccgctgtttctcgcgctcttggttctcgcggtgccgatggtggtaggaacccgcatcctcgaagagcgcaacctctcgtttctggcgatcctggtctgggtgcttcttggcggttttggactgatttggatgcgtgagggcatgggagtcacctggaccatctggctgatttccgtcgtcgttgcgacggatgtggcagggtactttgctggaaagacgttcggcggaccgaaactctggcctgccgtcagcccaaagaagacctggtccggcacctctggcggctggggcgctgcagcaggcgtggggctggtctttgcgctctttgtcggtcttccctggagcctcgtttggatctcggtttttgtgtcgatggcaagccaggctggtgacatcgtggaaagcgcggtcaaacgctaccgcaatgtcaaggattcaagccagatcatcccgggccacggcggtgtttttgaccgttttgatggcatgctgggcgctggggcactctgtttcttgatcgccatcatctggggatgaacctgccccaacgcggggcgcggggcgggtgatgcatggggtcactatgaaaaagatatcgatttttggggcaacgggatcaatcgggcagagcaccattgacctgatccgccgcgcccccgacgcctatgacgtggtggcgctcagcggtgggcataatgtggcgcagctggcgcgggacgccatagaactgcaagcagatatagcgatcacggcgcatgacgcccggcttgaggagctgcgctccgcgcttgcgggcagtggcgttgaagcggcctcgggcgcggcggccctggtggaggccgcaagccgtcctgcggattggatcatgtcggccatcgtgggcgctgcgggtcttgcgccgggcctcaaagcgctggagcagggcacgacgctggcgctggccaacaaggaatccctcgtctgtgcgggcgcgcttttgatgcagaccgctgcagatcacggcgcgcggattttgcccgtggacagtgagcactcagctgtgtttcaggcgcttgtcggcgaacgtatcgaagaggtcgagcgtatcatcatcactgcgtcgggcggtgcctttcgggactggccgctggaacggttaaaaacggcatcattggccgaggcctcttctcatcccaattgggacatggggcagcggatcacgatcgacagtgcgtcgatgttcaacaaggcgcttgaagtcattgaaaccagagaattctttggtgttgcgcctgagcagatcgaggtattggtgcatccccagtcgctggttcatgcgctggtcggatttcgcgatggtgcgctcatgagccaccttggcgcgccggatatgcgccatgccatcggctatgcgttgcactggccggaccgcaatgcgctgccggtggcgcggctcgatctggccgcaatcggccagctggaatttcgcgcgcccgatcttcagcgctatccggcgctgaggcttgcgcaagaggtcatgcggcgtggcgggctgagcggggcggccttcaacggcgccaaggaacgcgcgctcgatcactttatcgcggggcgcattggttttctggacatggccagcctaactgaagaaggactggcgacgctcgaggcccaaccgggccttattgatgcctcaatgacacttgaaaacgtcacccgagttgacgatctggcgcgtagggcggtggatcaggtcgtgacgcaacgaacaggatagagttttggacgcagtatttttggtctcgcaactgggcgggctcctttacacgatcggcagctttgtcgtggtgctttcgatcatcgtgttcgtgcatgaatacggtcattacatcgtgggacgttggtgcggcattcatccggaggtcttctcgctggggtttggcccggtgctggccagccgggtcgacaagcgcggcacccgatggcagctggcggcctttccgtttggcgggtttgtgaaatttctgggcgacgcggacgcggcctctggcaaggatgccagcgcgatttcggcggccgagcgcgaccctgaactgctgcgcaaaaccatgcatggcgcgccgctctgggcgcgggcggcaaccgtggcggcgggtccgattttcaacttcgtccttgcggcagtgatcttcaccggcgtcaatctgagccggggccagatgcaggagccttttgcagtaggcgaaatcaagccactgcccgcagagagctacaccctgcagcccggtgacgaaattctgtcggtcgcagggatcgtgacgccagatttttctgacgccgttgcttggggcgccttcgagggcggcctgccagtggaaaaggttctggagtatcgcgttgtgcgcgacggtcaggaaatgatcgcccgcgggccctatctgaccccaagcctcgtctccggtgtggcgccgcgcagcgcggcatctgacgcaggcctgcgcgaaggcgatgtgatcgtaggggtcgatggtgaagagatctttgccttctcccacttgaaggaacgtgtcgagaccggtgcgggtgcgcccttggagttgaccgtctggaacgcgggccagacacgcgaggtgacactaacgccacgccgaaccgatgaaccgacagccgatggcgggttccagaccaattggcggatcgggatcgccggcgggcttgcctttgagcctgcgcgcgagtcggtctcgcctgtggccgccgtcgggcagggggtgacacaggtctggatcatgattgaacaatccctttcgggtctgaaacacatgatcacgggtcagatcagcacctgcaacctctctggcccggttgcgatcgccgagatttccggaactctggcaagccagggggcgatgaatttcatctggttgattgcggcgctgtcgacagggattggtcttttgaacctttttccagtgccggtgctggatggcggtcacctggttttctttgcctatgaggccgtgaccgggaagcccccgaatgatcgcgcgatgcagatcctgatgaccatcggcctgaccctgatccttggtctgatgatcttttccgtcagcaacgatcttttgttctgctgagactgcgccatggcgcttgggcgggatggggcagccttgcctcgttcccgcccagatctcgccacaaatctttcctagcttctctttgggtgagtgattccggcggctgccggaccataagtgaatctggggaactttcatgcatacgctgcagcgatcttatgaaggtctggaccttctggtccgcctgaacatcgaccgcgtcctgtttgtgggggcgatctcttttgctatttttgccggggtctggatcggctcttttctctgatcagagggcgcagccgcagatttctgcgaagccaaaacagcttaggcaaaatttcaaagcagcggctccacgcctgctgcttttcttgtttttgacaacggggttcaaacccggtacgcagcttatcaagctgctataataattgggtataattgatggtctgggggaaaaacgcggcatgtgcccgcgatgcgcgccgagagggcgcaatgtccgtttcttttaagggctttctgggaaccaccgcgctttctgcggtgctggcgatcgggcttgggatcgcgccgctgccggcgcagtctcaggaattccggttcaccaatgtacgcgtcgagggaaaccagcgcattcaaagctcgaccatcgtggcctatacgggcctctcgcgaggagagcgggtgagcggtggtgagctcaacgatgcctaccgcggcgtgtttgacagcggtttgttcgagtctgtcgaactggtgccccgtggcaatacgctcgtcatcaaagtggtggaatttcccaccatcagccggatcagttttgagggcaacaaacgtctgaaggacgacgcacttggcgaggtgattgaatcctcgccgcgccgtgtgttcagcgccgatcaggcagaacgcgatgcgggcgcaattgctgaactctatcgcgcgcagggccgtctggcctctcgggtgacgccgcgcatcatccgccgcagcgacaatcgcgtcgatctcatctttgagatctccgaaggcgataccgtcgaagtcgagcgcgtctcctttgtcggcaaccgcgcgttctcggatcggcgtttgcggcgcatccttgagaccaaacaggccacattcctgcgggctctgatcaaccgggatacgctgatcgaggatcgtatccagttcgaccgtcaggtgttgactgatttctaccgctcgcgcggctatgtcgatttccgggtcaacagcgtcaatgccgaagttacaaaggagcgcgatgcggctttcctcgtggtggatgtgaccgaaggccagcagtttgagtttggcgagatcaccgtcaccagcgagtttgccgatgcagatccggatctctaccgcagtaaattgcgcctgaagccgggcgtgacctactcgccgctgttgatcgaaaatgcgattgagactctcgagcaactcgcggtgcgtcaggggattgatttcctgcgggtggagccgcgtgtcacgcgcaatgatcgggatctgacactcgatgttgaatttgcaatggtccgcggaccgcgggtctttgtcgagcgcatcgacattgaaggcaacaccaccactctcgaccgggtgatccgtcgacagttccgcatcgttgagggcgaccctctcaatcagcgcgaaatccgcaacagcgccgaacgtatcaaggctctgggcttcttctcggaatccgaggtggatgtgcgtcagggcagcacgccaagcgaggtcattgttgatgtcgatgtggtcgagcaacccaccggttcgttcaaccttggtggttcctactcggtggacgacgggatcggggtggcaatcgggatttccgaaaaaaacttccttggacgcggtcagcaactgtcgttcaatatttcgaccacagaagacaccgaagcctacaatctgcgctttggcgagcccaagcttctcggccgtgatctgcagttcgccatcgacctcggtctgagcgaaacagagtcgagctactccgagtatgacaccaaagaggtggtcttccgcccatccatcacctttgatgccagcgaaaccacatcgttgcagttgcggtatgggtttgagcaggacgagatggaaagccgtggtctcgacagcaacaatcaacctctggttggtccggtgcttcagcgcgagatcgcagaaggcaagcgcacgacaagctccatcggggcgaccttcacctatgacagccgtcgcaccggtctcaacccaacggccgggttccttgtccagagcggcatcgattatgcgggtcttggtggggacaatgaatacatccgtgccaccagcaagatcgtggcgcagaagcttgtgttcaacgaagaggtcactctgcgcgccaccgtggaagcaggctatcttggctggctcggtgacaatcgcagccgcaccatcgatcgctttcttctgacttcggacactctgcgtggctttgagcctggcgggattggtccgcgtgatatgagcggctcttacgacgacgcgctcggcggcaacctttatgcggtcgcgcgttttgatgcggagttccctctgggcctgccggaagagctcggcctgcgtggcggtctcttttatgacgtcggcaacctctgggggctggaagattccaacgctgatttcggcagcaatgtcgtcggacgcgacggctccttccgccatgtcgtcggcttttcgcttctctggaccacgggccttggaccattgcggttcaacttctccaaggcactggtcaaggaagacttcgacaaggagcggaacttcgacctgaccattcaggcgcggttctaatcccgttgcgacgtctgatctcaacacatctgctttgggcagtggggctgagtgccctgctgcccgcagcaactttgacggcacaggaacctcctgtggccaccgtgccggggattggccttgggggattctcccccgagcagaatctcggcattcccaaaagcctgatcctgaccatccattccgatcggctctattccgagagcgcctatggccagcggatcgcgcgggagatggaaggacgcagcgccgtgttgatggcggaaaaccgtcgaatcgaagctgagctcagagccgaggaactggatttggcagagcgacgcgccaccaccgacccggaggcgttccgcgccttggcgcaggcctttgatcagaaggtgcaggaaacccgcacgacccaagaagcaaagtttgtggaaatcaccaccgccagagacgaggcacggcgggcgtttcgacagacgtcgatcccgatcctcgagcagatcatggcagaaaccggagctgctgcgatccttgaacaatcgaccgtgcttctgagtgctgacgccattgatgtcaccgacctcgccatcacgcggatcgacaccatcctcggcgaaggcctcgatgccagcgaaccggacagcaatcagccctgaacttgcccgaaggggcggcaattgctaccacacatatctgacgaaaccaatggaacgtgacccatgagtgctgacgccaatcccgacctcaagagcgccgatatcggcttgattcaacagattctgccgcatcgctatccgtttttgctggtggacaaggtggtcgatatcgacggctatcaatccgcgcgcggcatcaagaatgtcaccatgaacgagccgcattttcagggccatttccccggtactccgatcatgcccggtgtgaccatcgtcgaagcgatggcgcagacctctggtgtgatgctcggggttggcatggatctgatcggcaccgatatgctgatctatttcatgaatatcgacaaatgcaaattccgccgcaaggttgttcccggtgatgtgctggaaatgcatgtggagacggtgcgcggcaaacccggtggcaagatcttcaagttttccggtcgcgccaccgttgatggcgaactcgccgctgaggccgagttcaccgcgatgatcgaccgggacggaaaggacggctgatgagcacgattcaccccagcgccattatcgaggatggcgccaaaatcggcgaaggctgcgaaatcggccccttttgcatcgtcggcgctgaggtggtgttgggcgaccgcgtggtgctgaagtcccatgtggtcgtgaccggcgacacggagatcggcgatgacacggttgtgttttccttctctgtgctgggcgagatcccgcaggatctgaagttcaagggcgagaagtgccgcaccgtgattggcaagcgcaaccgcatccgcgagcacgtgaccgtgaacgcgggcaccgaaggcggcggcggcgtgacccggatcggggatgacgggctgttcatggctggctgccacatcgcccatgacgcgcaggtgggcgaccgtgtgatcgtggtgaattctgccgcaattgcagggcattgtgtgcttgaggatgacgtgatcatcggcgggctgtcgggcatccatcaatgggtgcgcatcggccgcggcgcaatcatcggcgctgtcaccatggtgacgaatgacgttattccctacggtctcgtgcaggcctcgcgcggcgaattggatgggctcaatcttgtgggcctgaaacggcgcggtgtgagtcgcgcggacatcaccgcccttcgtgcagcctttcagatgctggcgcagggcgaggggacgttctccgaacgcgcccgccgcttgggcgatgaaaacgacagcgaatatgtgcaggaaatcgtggcctttatcaccggtcagagcgaccgccacttcctgactcccggcggctgagaaaggtccgattatgattgcactcattgctggtcgcggtgccttgcctgcggagctcatcgcacgtctgcccgagcgcccaatggtttgcgccatgtccggatcagaaccggatcaggtcgaggcggatgtgacctttcgcctcgaacagcttggcagctttctggaggagctgaagtccaaagggatcacgcaggtctgcatggccggggcagtgacgcggccacagatcgacccaagcgcgattgatggcgcaaccttgccgctggtgcccgtgttgcaagcggccatcgccgcaggcgacgacggtgccttgcgtgcggtgatcggcattctcgaacagagcggttttgaggtgaaggccgcacatgagatcgcgccggatcttctgatgcccgagggcgtgcctaccaaggtcaaacctggcgagatcgacaaggcggatgctgaacgtgccgccgtgattgcctttggtcttagcgccgcagacatcggtcaagcctgtgccgtgcgctccgggcaagcgattgcgattgagacgctttttggcaccgactggatgctcgaaagccttgcgcaacgcccggacgggcagggcggtctgttctacaaggccccaaaggccgggcaggacagacgcgcggatctgcccaccatcggaccggcaaccgtcgcaggtgcagcacgcgctggtctcaacgggattgtgctcgaggcggagggcgtgattgtgctcgaccgagaagaggtagtggccgcctgcgaccgccacggcctgttcctctggttgcgcgaggcctgagccttgggcctcagggtgtttgtccttgcgggggagccttcgggtgaccgccttggcgcggcgctcatgcggggcctcaaaacgctcgcgcccgacgtttcctttgaaggcgtcggcggcagtctgatgcagaccgaggggctgaagtcgcaatttcccatggaagagctgtccgtgatggggattgccgaggtcttgccgaagtatttcgacctcaagcgccgcattcaggaaaccgccgatgcggtggtggcgatgaagcctgacgtaatgatcaccatcgacagccctgatttttctctgcgggtggcaaagttggtgaaagacgccagcgatattcgaaccgttcattatgttgcgccctccgtctgggcgtggcggccggggcgcgcgacaaagatggcgaaggtcatcgatcatgtgctggcactgttgccgttcgagccgccttatatggaagccgccgggatggagtgcgattttgtcggccatccggttgtggctgagcccaaggcgagcgaggcggaaattgcaacgtttcgcgcggcgtttgatctgggcgatgcgcccgttctcttggcgctgccgggctcgcggcggtccgaggtggagcgccttgctgatgtgttcggtgcagcacttgcacagttcaaagccaaacaccccgaccaccggatcgttgtcccatccgcatcacatgtggcgcctatggtgcgcgaggcactggcgaattggcctgcggacagcctcgtgctggatccggcggatcatgcgcccgcagtgtttgccgcgcacaagcgcgcagcctttgccactgccgatctggcgctggctgcgtctgggactgtctcgctcgaattggccgcggcgcgtacaccgatggtgattgcctatcggttcaactggctcacctggcagatcatgaagcgcatggcgctgattgatacggtgacattggtcaatctggtgagcgacacccgcgtggtgccggaatgccttggtcccaattgcaccgccgaaaccattgcggcgcgtctcgatcaggtgtcgatggcacccgaggcgcagcaagatgccatgcgcctcacgatggaacgggtgggggaaggcggtgaagcgccgggtctacgtgccgcccgcgcagttctcgcgcggctcccataagcctgagccggccctttttgtatcaagcaaaagaaaagggagcccgaaggctcccgcattttttggtttactgacccttccagatccaaccgccgccataaattcggctgccattggggtcgtagaacacgcaggcctgaccgggcgagatgccttcttcggcagaaaagagctccacctcggcctctgtctctgagatcgggcggatgatcgcgtcgcgcggcgggcgggtagagcgcactttgacgctcaggtgccattcgtcacggctggtaaaaggtgcatcgcccaaccagttgatttcgcgtacaggcacccggcgggtggccagcatttccttggggccgacgatcacctgtttctggtccacatcaagcttcaccacgtagagcggctcgctgagccccccgatgccaagaccgcggcgttgaccgatggtgtagtgaatcaccccgttgtgttcccccaacacgcggccatcagcatgcacgatctgtccgggttcagcagcaccagggcgcagtttctggatgaccgaagcgtaatcgccattgggcacaaagcagatatcctgactgtccggtttatcagcaaccgacaggccatactgcgccgccatctcgcgggttgcgtccttggaaggcaaatggcctagcgggaatcgcagaaaatcgagctgctctggtgtggtggagaacaggaaatagctctgatcgcggttggcatcctcggcagaatgcaactccggcccgtgttcccccatcttgcgctggatatagtggccggttgccatgcagtcagcctccagatccttggccgtttccagcaggtccttgaacttcacacgctcattacagcggatgcagggcaccggcgttgcgcccgccagatagctgtcagcaaactcgtcgatgacggcatccttaaaaatgttctcataatccagaacatagtgcggaaagccgcgttcctctgcgacacggcgtgcgtcgtgaatatcgatgcccgcacagcaggcgccttttttcgcaagcgccgcgccgtgatcataaagctgcaacgtcacacccaccacatcatagccctgatcggccaaatatgctgccacaacagagctatctacgccgccagacatggcgacgacgacacgcgtctcggcgggagattttgcaaaacctagcgaattcactggtgcctcgttgtccagcgccatggcgtactccttacgagtcgagtggggaagatggaaagcatcgaagaatataggaaaatgctaagtattctcaaggggccgatttcacttcgcgttaaggcctccgcgccactctgcccgtatcaagctgaatacgcatcctagtaagggcatagcgatgtttttaaagaaagttgatggcccccgtgcggtcactctgccggacggaacagtcatgactcgggcggatttgccgcctcagaccacgaaacgctgggttgcctcgcgcaaggcggccgttgtgcgcggagttttgtacggattgattccccagaccgaggcattgcgcctctacaacctcagtgaagaggagttcagaagctgggttgccgccgttgctgatcatggcgaagacgcattgaaaaccacgcgcctaaaggatttccgtaatccttaaggtaaaaaccgccgcgttaacttgtgtgatcctaaaaaattaaccaacatggtaacgagacattaaccttttcgcagcaaggttaacgcaacctgaggacaacagagtacaggcggagacctaatatgcgcattcttctggtcgaggatgatcccacgacagcgaaaagcatcgagctgatgctgactcatgcgaacctgaacgtttataccacggatcttggcgaagagggcatagacctggccaagctctatgactacgacctgatccttctggatcttggtctgccggatatgaacggccatgaggttctgcgtcagctgcgtttgtcgcgtatcgagaccccgatcctgatcctctccggtgctgatgacaccgagaacaagatcaaaggctttggctttggcgcggatgactatctgaccaaacccttccatcgtgaagagctggtcgcccggatccacgcgatcattcgtcgctcgaaagggcattcgcagtcgatcatcaagacgggcaagatctcggttaaccttgacgccaagaccgttgatgtcgaagggaaatctgtgcatctcactggtaaggaataccagatgctcgagctgctctcgttgcgcaagggcacaaccctgaccaaagagatgttcctgaaccacctctatggcggaatggacgagcccgagctcaagattatcgacgtctttatctgcaagctgcgcaaaaagctcagcacagcaaccgacggcgagaactatatcgaaaccgtctggggccgtggctatgtgctgcgagatccgcaagaagatctctccgctggtgggccacgcatggcggtcggcgcctgaacgtcagacgggccatcatagcccattcatttaaaaaccccgtcgggctgagcatcccggcggggtttttgcgtctctagatctgacactggacctctctcattgcgggcactatcaccatgggcagaacactacccaaagggcggagccagaatgacagagcaggatccccggtcgatggatgaggccgacgcgcgcgctgagtttgaggcgctgcagaccaagatcgaaaaagccgatcacgactatcaccaaaaagacgcgcccactctgtcggatgcggattacgatcgcctcaagcgtcgctatctggcccttgcagacgcctttcccatcttggccaaagacggcacccgtgtagcgagcgttggcgcgccggccgcctctggctttggcaaggtcacccatgcgcaacgtatgatgtccctcggaaatgcgtttgaagatcaggatgttgaggattttgctgtcgggttgcgccgctatctggggctctcctccgaggctccgctcgccttcaccgcagagccgaaaattgacgggctttcgctttccctgcgctatgaggcgggcaaacttgtgcaagctgcaacccgcggcgatggcgcggtgggggaaaacgtcaccgaaaacgcccgcaccatcagcgatattccgcaagaaatctctggcgcgcccgaggtcctggaagtgcgtggcgaagtctacatgagccacgcagatttcgaggctctgaatgcgcgtcatgccgagaccggcggcaagatatttgccaacccgcgcaatgcggcggcgggctcgctgcgccagctcgatgctgaaatcacccgcgcccgacctttgcggttctttgcctatagctggggagagctgtctgaacctctcgcagaaacgcaaattgacgcgatcgagagactggcgtcccttggctttcagaccaatccgctgacacgctgctgcgagcagatttccgagctgctcgcgcattatcacgccatcgaggagcagcgcgcggatctcggctatgacatagacggagttgtttacaaggtgaacgatctgtccttgcaagagcgtcttggctttcggtcaacgacgccacgttgggccattgcgcataagtttccggccgagctggcctggacccaccttgaggggatcgacattcaggttggacgcaccggcgccctgagcccggttgcgcgtctgcatccggtgaccgtgggcggtgtggttgtctccaacgccacgttgcacaacgaagactatattgcgggacttgattccaaaggcgctccgatccggggcggcaaggacatccgcgtcggggactgggtgcagatctaccgcgcgggcgatgtgatcccaaaggtcgccgacgtcgatctgagccgacgccccgagggcacggagcgttatgcgttccccacgcgctgtccccgatgcgacagccccgcggtgcgcgaagaaggtgatgctgtgcgacgttgcagcggcgggttgatttgcccggcgcaggcggttgagaaactcaagcattttgtctcgcgcgcggcttttgacatcgaagggctgggcgccaaacaggtggaacaattccacagcgatggatgggtgaaggaacccgccgatatctttgagctccaacagagatatggctctggtttgcagcagttgaaaaaccgcgaaggctggggggagaaatctgcgtctgctctgtttgcagccatcgaggacaagcggcgaattgagtttgcccggctcatttttggcctcgggatccgccatgtgggagaagttgccgccaaggaccttgccctgcatttccggacctggagcgccctggcggaggccgcggatctcgcgcgcgcagcggcgttggcgcaccgggctgcggatgaagccgagattgttgaacggcaggaggcacaagccagtgcgcgccgtgcaaaaatctctgaggcccgaaatgccgcggttgcaacctgtgcagttgcgccggactcgcaggcggcgtgggatgatctcatcagtgtggatgggcttggcccaaccgtggctttgtctttgtcggatgcctttgccaaccccgaagaacgcgccgcttttgatcgtctgatcgcgcatctagagattattgaaccggatgccccggcagatgacagccccgttgcgggcaagaccgtcgtctttaccggcacgctcgaaaaaatgacccgcgccgaggcaaaggcgcgcgccgaggcgcttggggccaaagtgtctgggtcggtgtcaaagaaaaccgatattcttgtggccggaccgggcgcggggtcgaaggccgccaaggctgcagagctcggcattcagacattggatgaggacggatggctggacttgatcgggcaggcatagacgcatcatgagcggtcgcccagaacaattgttcccgcttttcgcggaacttgagaccttgcaaggcgtcggaccaaagattgccgagcattttgcgcagctgcatatcacggccccccgcgatcttctgttctcgctgccatacagcgttgttgaccggcgtaggcgcgaaaccatccgggggttggatctgccgacgaccgcaacggtcgaagtcaccgtggggcgccatcgtccggcccgcaaccggggcggtgcctatcgcatcgacgtgacggaccaggagactgagtttcagctggtctttttccacggccgaagccggtatctgaccgcgcaattgccggaaggcgcgcggcgtgtggtttcgggcaagcttgagctatttgatggcatggctcagatggtccaccccgaacacatgctgccgctagaagaagccggggacattccggactttgagccggtctatcatctgacacacggcatcacccaaaaaaccatgtacaaggccgtccagagcgcccttgcgcgggtgccggatctcacagagtggatggatcccgcgcaaaaaacgaaacagggctggccggattggcacgcggcgatttctgccgcacatgcgcccgcgacgctggaggatctaggcgcacaggccccggcgcgcgcgcgccttgcctatgacgagctttttgcgcaccagcttacacttgcgattgcccgctcggtggagcgggacctgccgggacggcggtcagtcgcgacgggcacgctgcagagaaaggtgcttgccacattgccctatcgccccaccggggcgcaggggcgagccatagaagagatcaccgccgatatgggctctgagcggcgcatgaaccgtttgctgcaaggcgacgtgggagcggggaaaacgctggtcggtttcatggcgcttctggttgcggtcgaggctggcggtcagggtgtgatgatggcgccgacagaaatccttgcgcggcaacatcttgaagggctcaagccgcttgccgaagacgccggtgtcgttcttgagatcctgaccggacgcgacaagggcaaggaccgtcgcgccaaactggagtccctcgcgcggggcgacatccatattcttgtcggcactcatgcggtgttccagcaagatgtcgtctttgacgatctgcgcctcgtgatcgtcgatgaacagcaccgctttggcgtgcggcaacgcatggaactggctgaaaaaggcaagcgcgcggatgttcttgtcatgaccgcgacgccgattccgcgctcgctggcgttgacccaatatggcgatatggaggtctcgatcctcgatgaaaaaccgccaggacgcaaaccgatcaagactgcgattctgagcacagagcggatgtccgaggttgtggaccacctgcgtcgtgccatcgacgagggacggcagtgttattgggtctgcccgctggttgaggaatccgaggtgatggatctgaccgctgcggacgagcggttcaaacacctgcgcgcggtcttgggcgaggaggtggtggggctggtgcatggccaaatgccgccagcggaaaaagatgccgccatgctcgcgtttcaagaaggccgcacccgtgttctggtggcgaccaccgtgatcgaggtcggggtcaatgtccccaacgcgtcgatcatggtgatcgaacgtgccgagatctttggccttgcccaactgcaccaattgcggggacgggtggggcgcggcgaggcgcagtccacctgtttgctgatgtatcagccgcccctgaccgaaggcggacgcaagcggctcgaggtgctgcgcgagagcgaagatggatttgtcatcgccgaaaccgatctgcaaatgcgcggtgccggagacgtcatcggcacggcacaatctggtttgccacggttccatatcgcggatctcgagcgtcagtcggatctgatggcaatcgcgcaaagcgatgcgcgcgcattgatgacctcggatcccgatctctccagtgcgcgcgggcgcgcagcaagaacgctcttgtggttgttgcgtcaggatgaggctatccggttgatttcagtcggctaattggcctgtgttcctatcctgacagatttttgttccagtttgttcgcaaatgttcttagaaagttctttacacgactcgcttaaaatgagaacaaaaggacaacaagacgttgcaaacgtcagacagagatcgaggaggttttcagatggtcacgcaattcaaaaccgcgctgcgcaacgcacaatccacattgctgcaggatactctcggtgcggccgctttggtcgtgatgttgatcgtgggcctgcatcttccgggtctcgtctgagcgacgtttttcagtttcgtaacccgttctcagtttcttctgtgctgtcatgccgggggcaccagcctcaagtcccgtgttaggatcgattgcctgttcgatccgcaccagaaacttcgtttctggtgattggtgcccaccgggtcccgcatgaccgcgcgatcacttgccgccgccatctgcccggatgagcggcggttttttctgttaacgtgggatgttgcaggtcaaccggatcaggcgcagtctgctttttgcgccgtttgcatcgcctccagcgtggcctctagcgccaacatgatcgaggcgtgacggtttttgaagtcccgcgcagggatcagtacttcgagcccgtcgaacggagcctccggcaccggcccgccttcggtgagcattgccttcagctgatcacgggcccgctccacctcggcagcgctgcgtccgatgatggcggcgcccacaacggcagctgcagcctgacccaaagcgcaggctttgacgtcctgcgcaaactgcgcgacttttccgtcctcaagggtcacatccaccgtcactgttgatccgcaaagcggcgagcggcgttttaccgtggcatcggcctgctcgagatgcccaagatggggaatatcagccgccagtgcgaggatcttggtggagtagagcttgatcagatcggtttcgccggacatgtcgtgttcctgggtttcccttgcaccgtgttcctcatacataggggcgtgcccctgagatgcaaaaggtttttaacatgcacgatttggtgaagttctcgcccgagacgctcaaatacaacgaagctggccttgtgccctgtattgctcaggatgtggaaagcggcgagattctgatgatggcctggatgaacgcggagagcgtcgccaaaacgctcgagaccgggcgggtgacctattggtcgcgctcgcgccagtcgttctggatcaagggggagagttcgggccatgtgcaggaactggtcgaactgcgcgtcgattgcgaccgtgatgcgcttttggcaatggtgcgtcagaccgggcctgcttgccacaccaatcgccgcagctgtttctacacggctattcgggatggcgaagagcatgagatcatgacgccaatatcctgatctaaaatgctaatctagcccgacgagttgtctgatatcttgcgggctggcgccctcggaacggtattttgaaatggcgcgggcatcatcgcgtttggcaagtctcttgccctgatcgtcccggatcaggcggtgatgatggtagcgcgggactggcagatccagaagcgtctgcagcaccacatggatctgcgtgctttcaaagagatccgcaccgcgcaccacatccgtgatgccctgatcggcgtcatccaccaccaccgagaggtgataggaactgcccatattgcggcgcaccaggatgatatcgccgactgcttgcacaagttcttcgggatcaagcgagatatggccgccaagttcctcggatgtctcaataaaactcagggctgggagccgtgcgagcgccgccttcatattgaggcggatcacgtcggttgggcgtgcatccgagagcggtcgctggcggcatgtgccggggtagatgcgcccgtcggggccaaactgcggcacaccctcctgaggtgcgcctgccgcggcctcaatatcggcgcgattgcagcgacagggataggtcagccccaatgcgctcaggcgttccagcgcggcgcggtatcggggcaagcgtgaagattggcgcaagaccggctccggccaactgagaccaagccaggcaagatcctgatagatctgctcttcccaagaggctcgggcgcgcgtctgatcgatgtcttcgatcctcagcagaaatcgaccgttctgctggcgcgcaaaatcagaagcgagcaacgcggaataggcatggcccaagtgcagaggccccgtcggagaaggggcaaaacgagttgtgaatgtcacactttttcaatcacatagacgcaggcgttcaggttgaggcccggcaggtgggggccatgttccttgaatagcaaccgcgcagccccgcaatcaagccattcgttcatggcaccgatatatgaggggtcggcaagggcatgatcgttcagcgaaaacgccagcagatcgccacgattgaggcagtgcatcagatgcccaaagaccgaggcaggtgcggctccggtcccaagcacgccgcaggcgaccacggccttgtagacgccggatttgaacggtttgcggctgtcggggtccacaacggagaggtgacgatgggcgcctttgccttgggcgaccttcagcatctctgacgaagggtccatcccgtcgatctgctcatagccgacgcgtcgcagcgcgatccccgaaagcccggtgccacatccaaaatcgaggaggggcgcctctgcgtccggtagaacggaccaaagtgcatctgcaatgcgacccggcgttgcgtagttgttctccgcaatctccgtgtcgtagctctcggcccagcggttgtaatgatcgacagtctcttcgactgtgttcaactcatatgttttctcgaggaatgtatcactcatgatcccagtctagagccgggatcatgagtgcgtccatcaaaaatttgtgagccattcctgccatgccaccttggcgcgatcggtataggccttgtagcggtccttgcggccacgacgtccacctttcagcccctcgaccgggcggaacaggccaaaattgacgttcatcggctgaaaagtcttggcttcggcgccgccggtgatgtggtggatcaaggcccccatggcgctgtcctgcggcacctgaggcaggtccttgccgaggatctcagcggcggccatacgcccggccaacaagcccatcgccgcactttccacatagccctcaacgcccgtcacctgtccggcaaaccgaatgttcggctttgatttcaggcgcatctcatgatcgagcagcgtcggagagttcaggaaggtgttgcgatgaatgccgccgagccgcgcaaatttggcgttctcgaggccggggatcatccggaagacatccgtttgcgcgccgtatttcatcttggtctgaaaaccaacgatgttgaaaagcgtcccgagcgcattgtcacggcgcaactgcaccacggcccaggccttttcgtccggcttgtgcggattggtaaggccaacgggcttcatcgggccatggcgcagggtctcgcggccgcgttctgccatcacctcgatcgggaggcagccgtcgaaatagccagcggtttcgccctcatggaactcggtcttgtctgcggccagaagcgcgtcgatgaaggcctcgtattggtccttggtcatcgggcagttgaggtaggcggtgcgctcttcctcggtttcgcccttgtcatagcgcgactgcatccaggcttgggacatgtcgatactctcggcatagacgatgggcgcgatggcatcaaagaatgccaaccgttctgccccagtttcgcgctggatcgcttcgccaagcgcgggcgaggtgaggggaccggtggcaaagatccagtgcccctcggtggggaggtctgtgacttcctcgtaggacacgcgcacattgggcagcgccttgagtttggcggtcacggattccgcaaagggatcgcgatccacggccaacgcacccccagccggaagccggtgttcacctgcggtggtcataatgagactgttggccgcgcgcatttcccaatgcaaaagccccactgcattctgctcgtcatcatccgagcggaacgagttggagcagaccatctcggcgaggttgccggtctgatgggcaaaggtttcaaccttgggccgcatctcgtggatcaccacgtcaacgcccatgtgcgccgcctgccaggcggcttccgatccggccattccgccgccgacgatatgaagctcttgtgtcatgaaaggccacatagggcaggcggccttcgggcgcaatatcgtcgtgcgcgcacgttgtctctgaggggaaattatttgggccgcagcttcgaggacgtcaaatccgggtgagagatccggtaggagggacgatccaaagctgcagccccaatagcgtgtagccggttggcttgcccaactcttgccactttcttgccttctttagaagcctcaatacggaaacaatatcgcgccattcgtaaacaaagactaaattatccgaaaattttaggaaaaacgtcagaacactcagcgatctgatttgtctcataaaaatgccgtggcgtttttatctttgcctcttgagtggctggttcgggcgtgcagactgatacggcattaagtggaagaggcaacatggaactggtgtttgataaagacggcctcagcgcctatctcgaggaggtctttcctcagatacagggcgagttcagcatcgatgcgcttgcaaaaggcgagatcaccatgcgcctcaacgtgcaggagcggcatttgcgtccgggaggaacggtttcaggcccgtcgatgttcgcgctcgctgatgtctcggtctacgccttggttttggcgcacctcggacgagaggcgctggcggtcacgaccaatgcctcgctcgattttatgcgcaaacccgaaagcggacgcgatctcttggggcaagcacgcctgttgaaactggggcgcacattggcagtcggggatatcctgttgttctccgaagggatggaggccccggtcgcgcgctcaaccatgacctattccatcccgccgaaacgctaaacgcgcccgaggtaggaaccgggacgcgtttgctttaaggtcgctaagtaagctaccttatggaaacagtttcttgacgtatccgggcagcgcgaatgccgccttgtgcacctctggggtgtagtagtccggcgaaaggcctgccgctgcaaaccgagcttcaagcgttgtcagatccaccgaacgcgcctttgtggagtggctaccccagcccaatgccatcgggccgccgacgtaggtcggaatcgtcgcgagatagcaggtcgcatcctgaaacagcgcttgaaaggcccgcatcgtgttggtcagctcatcgccctgcatgaacggcacgccgttctgggtgacgatgatgccatcctcggttagcgcacgcgctgcatggccatagaatgtatcggtaaacagcacttcgccggggccgatggggtcggtcgagtcgacaatgatgacgtcgaatttatcttcggtctctttcataaagaccgcaccgtcattgatcaccaggttgagacgcgcatcgtcaaatgcgccctggctcagcatcggcaggtattccttggaaaaatcgacaacgccagcgtcgatttccaccatggtgacatgctcgacggaggcgtgtttcagcacctcgcgcgcaatgccaccgtcgccgccaccgatgatgagcacacgtttggcggccccatgtgccaggatcggcacatgggtcagcatttcatgatagatgaagttgtcgccttcggtggtctgtaccacatcgtccagcgtcagaacgcgcccgaaggtgccattctgaaagaccttgagccgctggtgctcggtcttgctgtcataatacatctcgctcacgcgcagggattgggcgaaatgatcgtgcaggcgttctgtgttccagacctctttcgtcatgctgcgatctccttggcgacgatttcctcgccgcgcagcaattcgcgcacttctaccacatcggtctcaaaggcggcttttagcacatcgacggctttccaaggctgtgcatcgccacacatgaagacgtcaaatgcgccgtagccgatctcgggccaggtgtgcacagagatgtggctctcggcgagcacggccacacccgacacaccctgaggcgagaatttatgggtatggatatgcagcagggttgcgccgcagacctcgaccatcttgcgaaacgcgtcttcgatccgggcctgacaatccagtccggagcctttcatcacttcgatgatcagatgggtcccggcaaagaccttgccgtcgcgacggataaagtgatcctcccggtcggcttcgaccaaagagttaacaatagcggtgggtacaccgcgggcggtatcttcctcatgggcgcctgtctccagaccgatccccagttggaagaggttggcgtccgacatgacactccccttcgttccagtagatgacaatccagacggtccttagcgcccccccgaataagagttcagggttgggatcggtaccgaaagtgaggcgcagataggaaagcgcagagattcgatcaaggcaaaaatttatgaaacttgaattcggcatcaggatgtgaagtggcgacataaaaaaggccggagacgagctccggcctgccagttggttctgtgccccggggatcagggtctccagaacggaagagttccttcgcgcatggcttcctcgcgatggaggccaatatcgcgcaactgatgagcatcgaggcggctcagctggcggcgggtgcgttttcggaccgaccatttggtgaccagaaccgcaaatccaatcgctgcttccgcaatcatcggcagggccgggcggttggtcagataagcgagatgcgtcgggtgttctgtcacatttgtcatggtctgtctcacattttgtattgatgcaatttgaatgtactggcatgtattgaatacaaagcgtgatacggattgtctaagcggagattgtgatgggtacaatttggccctccaccctgaccgggtccctgaccgaaaagccggggcccaagtacaagcgcgtggctgatacgatacgattggcggtggagagtggtacattgcaggtgggcgcaaagctgccgcctgtccgcgagctcgcctatcagctcagtatcacgcctggcaccgtcgcgcgggcctacacgatcctgacagacgagggcatcttgcaggccgaggtcggacgcggaacctttgtggccgaacgcgaaacggctgtgatggatgacgtctggtcgcggcagttgcatcttcttgaacgcagcaaccccaatcacgtctctctgttcagcccgcgtcttgtcgacgtgggtcaagtcaagctgatccgcgaagcgctccgaaaagccgctgattgcgaccgcttggcgttgttgaattatccgacgcgcgacgcctatcagccggtgcgccaagcggttgtcgactggctatccgataccccgctcgggccactgagtgagcgcgatgtggtcttgacccatgggggccagaatgccgtcatgacggtgatgcaagcgatcctgaaagagagcaatcccaccatcttggtcgaggacctctcttatgccgggttcaggcgcgctgcagagatcctgcgtgccaaagtggtcggtgttgcgatcgacgaaaacggcattgtgccagaggcgttggaggctgcgatcaagaaatcgggtgcatctgtactttgtaccagtcccgaagtgcacaatccaaccggcgcttttaccccgcttgaacggcgcaaagagatcctcgccatattgagacgacacaatgtacaattgatcgaggacgattgttatcgcatgggggaggcccgcgcgccgacctatcgcgcgctcgcgccggagctcagctggcatgtgacatcgatttccaaatcgctcaccccggcgctgcgggtggggtttgcaatcgcccccgtcggcaaatccgcagatctgcgccgcgttgcggaatacggtttctttgggcttgcgcagccgctcgccgaggtgacacgcctgctattgtcggacccgcgcagcaagaagctggtccagaccgtgcgcgacgagatggcggaatatgtccgtgtcgccgtaaacgccctcggagcctttgaactcacctgggactcgcaggtgccgttcctttggctgcggctgccttcgggctggcgagcgggtgcgtttacacgtgcggccgaagggcagggggtgcaactgcgctctgcagatgagtttgccctgagggacgggcgtgcgcccaatgcagtgcgcatcgccgtcaatgggcatgtcacgctggcgcgatttgaggatgccatgctgcgtttgcgcatgctattggacaacccaccagagcaaatcagcgtctgagggcataatcggctccagatcattggggtattttgatacctattttgtaaccccctgtaatcaatgggttttatgtggtttggctgtattgactgttgtgtaacagcgccgtaaaccccctccatcgaattcagatggagtcgtccacggcgccatcgtcacgacaaacaggattgacctgacatgaaaaccttctctgctactccggcagacatcgacaagaagtggatcatcatcgacgccgagggcgtggtgctgggccgtctggcgtcgatcgttgccacccgcctgcgcggcaagcataaaccgtcgttcaccccccacatggacatgggtgacaacgtaatcgtcatcaacgctgaaaaaatccagatgaccggtaagaagcgcgaagagaacttctactggcacactggccatccgggcggcatcaaatcccgcaccaagcagcagatcctcgagggtgcacaccccgagcgcgtggtcatgcaggccgtcaagcgcatgctgccgggcaaccgcctgtcccgtcagcagatgaccaacctgcgcatctatgctggtgccgagcacccgcatgaagcccagagccccgaagttctggatgtcaaatccatgaacaagaaaaacacccggagctaatgacgatggctgatcagatcaacactctcgaagagctgggcgccgtcgcaggcgtcgaaaccgcagccgaagagctggccccgcgcgagcccgttcgtgacgagctgggtcgttcctacgccaccggcaagcggaaagacgcaattgcccgcgtttggatcaagccgggttccggcaaggtcgaagtgaacggcaaagagatcaacaagtatttcgcacgtccggtgctgcagatgatcctgcgccagccgttcacggttgccggtgtcgaagaccagttcgacgtctacgcaaccgtcaaaggcggtggtctctccggtcaggccggcgcggtcaagcacggtatctccaaagcgctgcagctttatgatccctccctgcgtggcgctctcaaagccgcaggcttcctgacccgcgacagccgcgttgtggaacgtaagaagttcggccgccgcaaggcccgtcgctccttccagttctccaagcgttaagcttccggaacttacgaatacgcaaaaggccgcctcttgggcggccttttctgttgtaggatagcgtccaccgtcgcaggcgaacctgcgcgcagggtcagctagcgcgcgagagctgaggcatattgtccgccgcctggtcgccgcggatcttgaaacgctggacgatttcgccaagctggcgtgcgttggagttgaggatgctgctggcggcagtagtttcctcgaccatcgcggcgttctgctgggtcacctgatcaagctgaaccacacctgtgttgatctcttcgagcccagtggactgttcaaccgcacctttggtgatctcggtgacaagcgtcgagatatgggtcacctggccaacgatgctctcaagcgcctcgcctgcatggcgcaccagatccacgccacgctccacctgttcggagctgttgccgatcagcgatttgatctccattgccgcatccgaggaacgcagcgccaaggcgcggacttcggaggccaccacagcaaatccacgaccggcttcgcctgcgcgcgcggcttcgacgccggcattcaacgcaaggagatttgtctgaaatgcgatgtcgtcgatcacactgatgatctgcgcaatctgctgggaacccttttcgatctcggacatggcctcaaccgcgtcttttacgacagtgccgctctgagttgcttctgatcttgcctcttcggtggtgcgctctgcgttgcgggcgccatctgctgcggatttgacgctggccgtcatttcctcgagcgcagccgccgtttcctcaagcgtggccgcctggctctctgtgcgctgtgacagatcgctggccgcctggtcgatttcagcggcaccggtgcagaggctgccagctgtatcgaccagttcctccatagattcacgcagtcgaccgatggtctgattgaaatcggcgcggacatcttcgtagtcctcggggaagggctcggtgaattcaaccgtcaggtcgcccacggaaagacgcgtgaaggcaccgcgaagttcgccaacgatgtgatcctgttcctttttgcgcttatcttgctcagcctcaagcgcttcggcctcgcgcagggtcttgagggtttcttgcttgaaggaatagattgcatgcgccatgacgctgagctcatccttgccttcgataccctgtacaaagacgctgtaatctccacgcgtgaaggctttgacaacatcggtgagctcgcccacgcgtttgatgacacgcccaaacatataaaccgcaatgctgaacgccagcagaagtgaaatcagagtcacggctgcaaacgcgcggaacgcggtttgggaactgctttcgatgtcggtcgcaattctgtcaatcagggcgccaatctcgatctcttgttcgcgcaaggtgttgatccagttcgttgaaatctgaaaccactcccctgcggtcagcccgccgaagtccccggtggaatatccccgcacgagcgtgctgcgcgtttctgcaatctctttgtaggcatcggtcgaaagcagttctgacaaccacacattgagatctaccagcgcatcgacctcgtggagataggccccctgttcgccgccgaggtggacaaagcgatcgtgcaacgcaaggtcaaagcctttcccgaggccggttgcccccatagcgcgctcaagccctgcggcctccttggctgaggcgagcaagacccgagcttcttcgagaagacgcagccgctctgcgggctcgccctctgtcgctgggcgcgccatttcaagcatcaagccgatggtcgaggtgtagaacttggccatttcaggcaccgagaggcccaagctgtccacgcgttggcgcatatcctgaagctggccgatccgctcgcgcaccgcagcggtcatgtccggtttagcgacctcaatcaccggaatccgcgacatggagtctgcaatggcttcgtcggtgaggcgccgctgttccgtgagttcagtggggaagttcttgccctgcgaagcgatgaaaccggcagagaagccgcgctctttttgcatctcgtgaaccacatcgttcatgagggattcttcgagagttttctctttggttaaccttgcgtgtgcgtatttgtcccactgaatgtgcagctcgtcataagcaagatagctcgacaatgccatcattggcccaatgaccaacagcataaccaatcgcagtcgcatagactcatcctcgtaaacagcgcaaacttagaacaatctaggaggcgatggttaactcatcctgaaacgggaatgcggcgatcattaaaaggcagcggattaagcgcgcacggataaaagaggcaccgggcacggacaagagcgccctcaatcactcagctatctggatcaatcaatccaaggccccgcaggtacacgccaatgccgctctccaagagatcctctggcgcataaggcgaggcagtgcccggcgcgttgcgcgcataaagttccacgacaccgtggctcatggccatgacatgggccgagaacatggaggcaggcgggcgtttttcggccggtatatgttggctgagtttggcggcggcttgttcgagcactccgcgcgcgcggctcgcggcttctgccagctcgggcgtgcgattggccgaaatgccgctttcaaacatcgcgatatagtgaccggggtgtttgcgcgcgaaggcgagataggcacgtccggtcgcttcaaacgcggccagcgcagacgactgatatttatcataggcgtgctgcaacaagtccgcaaacatcaaaaagccctgccgtgcggcttctgcaatcagatcttcgcgcccctcgaaatggcggtaaacggcagccggggtgacgccagcctgtttggcggcctccgaaagcgtaaaccccgtcggccccttgacctcgatgaggcgcagggcggattccaccagagcctggcggagattaccgtgatgatagccacgtttagccatcccagatctcggggcctccacaaatcagcgggtcagcgctgccgagcgcagcgcgatccttgttggcgtagtcgacagacagcagcacatgccggatggcctcaagccgcgcacgtttcttgtcatcagagcgcacgatggtccagggggcctcggggcggtgactcagggtgagcgtttcctggattgcctctgaataggcgtcccagcgtttcagcccttcaacatcgatccagctgagtttccactgtttgagtggatcgctctcgcgggccagaaaacggcgcaattgttcggcacgccccacattcagccagaatttgaacagttggatcccttcgtcgaccagcatcttttcaaagtcagtgacttgcgaaaagaagtgcctgcgctggctgtcagtgcaaaagtcaaaaaccttctcgacgactccgcgattgtaccagctgcggtcaaaaaagacgatctctccgcccgccggcagctgagagatgtagcgctggaaataccattgcgttgcctcggtttcggtgggtttgccaagcgccacaacgcgggccccgcgggggttcaggttctcgcggaagcgtttgattgtaccgccttttccagcagcgtcgcgcccctcaaagacaatcgcgacgcgctgaccagacgccttgagcgacgcttgaagcttgaccagctcgacctgcagcgccctgtattgatccttgtagtcgcccttggagagctcttcgtcataagggtagctggggctcagaatgtcatccttgccagcatcctcgatcgccttacgcacctctttgggggcttcattctcgaaatactggctgattgcgccgtcaaatggcaaagtcatttccaccctgtcctttctcgcccgcccacacttgccctgtcactgttcaatgttaaagcgattaacgcaagtttgcccgcgttgccgctcgatggaccgctgccaccacctcctgcgtgtgggtctgatgcggcatatgtccaacatccggcaacggcgtgagacgcgcggtccggctgtccgcaacaaggcgctcggcatgaattgatatgcccacggtggtgtcggcggtgccgtgcaccacttcgatgggcatgctgaggtcaggatactttggcgccatcgcctcgacctcggtcagaagattggcgcgctgcttggcattggcccgcaaggaactgcggcgcaggctcatggcgagcccaaaatgatctgcaaacccgtcgggcaccgcctgcggggcaaagacgtccttgagcgagtcgcgtacatagctcttgggcacaaaggcggtgagcagcgggacgatgaccgcgctgccaaagcgcgacgaggtcagtttgtaaaaggtcggtagttccgcgtcccaagggtgcgatacaccagaaacgctgacaacggctgcggtatgctgcggaaactccgtcgcccaggcgagcgccacggcgcccccgtagctttggcccagcacgatcgggcgctgtgcgccgaggcgcgcgctggctttttgcaaaatggccgcctgggtttggatgctggtcccatcagcggagattgcatcggaatagccaagcccaggtcgatcaaagatcaagatgcgataggcctcttcgagcgcgggcgacagtcggaacgtcatgtcccggatgctgccgttggacccatgaatcagcaccagatcaggggcgctgccttgcggctggccgcgctcgaccacatggatctgatggccgtccacgttcaggaactgtccttgaggcggatgattggcgatactctcggcctcgcgcagtggggcgcgcagggcggtaaagcccgcaaccccagcaaagccaagcgtcacggcaagagcaaggatggcactcatccgcaaagatcaggcccgaaggtccgtcgtgtcgagaccgatgcgctccacatcatatggggtcgtctgatagatttcagacacccagttgccatagagcagatgcgcgtggctgcgccaacggttgagcgggcgctggcttggatcgtcgtccgggtagtagttgatcggcacgttgatctcggtgccgctggcgacatctcggtcatattcttgtttcagcgtgtcgctgtcatattcaaagtggttgaagatatagagcgcacggtgcgccttgtcctcaacgaggcaggggccgacatcggcgctgcccaagagcgtggtcagacccggtgcggcgtcgatctcgctctggctcatttcggtccagcgcgacacggggatcacaaaatcatccgaaaacccgcgcagatagggcgaggtcggctgcaggttctgatgccggaaacagccaaaggccttgtgatccagcatatgtttgcgcacgccgtgaaagtaattgatcatcgccatgccgccccagcaaacgccaaaggtggaatgcacattggtctgcgtccactcaaagacctcgcagagctcctgccaataggtgacgtcctcgaacggcagatgctcaatcggagcaccggtgatgatcagaccatcgaatttctcgtcgcgcacctcctgaaaggggcgataaaactcttccatgtgggcggcggcggtgttcttggtctgatgctcggtcatgcggatcaaggagaactcgatctgcagcggcgtcgccccaatcagacgggcaaactggttttccgtctgaattttcttcggcatcaagttgagcaggccaatcttgatcggtcggatgtcctgacgcgccgcttgatccggcgacatgaccatgacgccctcgtccgacaggacggagtaggcgggcaggtcagcggggatcttgataggcatgtcgtgtcctttgtgggtgcgctaaaagtagcagggtgccgttaattaagtctgttccgctcgtgtctcaagagcggatgcaatcaactcctcgaaatcgcttgtgttctggacgtgtgccacctgatctgccgtgaccgtcacgccccaatgtgcggccatcgcctcatagcggggctgacggtgcgcaagcgcctgcgcataggtccagcgcaagaaggcatgaggatcaacatctgcgtctgtgatgttgttttcattcagatattcctcccaaacacgggtgaggaaggcgggctgataggccattggctttggggcgcgatcaaaccgacgaatgagctcttgcgtgtgatcctcggtgcctttgatccagaccagaagcgtatgcgcgctgagttcgctcaagagcggatcattggggtcatttgcatcgacccactcgcagatcgagcccccggaatcgcagatgaaatgcggatagccgtaaatgcggtcggaacggtcgatgaaatagcgcgtatccagcagcgcgtcgatttcggcgcggcggaactggtcctggcgggtgcggtactcctcgatgggcaggccgcccttttgggcgtcacccggcaccccgagataggcggttacggcgctcaggttttcaaaggtgatattggaggaaatatcaatcgaatccgacagcagcagatcgcgcagaaacgggactttcatcgcctccgccttggcattgtccgcgatatattcgcccatatagcgcgtcccgatgcggtaatcggcagagtaatgaaaccactgaccggagcggcgcaggatgttgctgatataggtttttccaagcccggacatgccgaagaaaagaacccgttttgagggcgcgtcgcgccacgcctgagcggaggtatatagcatgaaactgctgccttattcgcggtctacgctgccttgctagacaggcagaagcgacaggtcaatcacaggcgcgacgccagacgccaagcggcgcggcgtcacccacaaaaaagccccgccagtgagggcggggcagttccgtgtcctttgatgcggcgtttagaagtaaaagccaaccttgacggcaaagctcagcgcatcgttgtcgttgaaattcgcaaccggcgtaccacccggcgatgcaaccgcatccccaagcttggtgtagcgcacgcccgcgccgattttcattttctcggtctggtactgcacaccaaggcggatcgcttccatcccgtgggtcggcgccagcggagacacgaggttgtcgccatccgcgtcctcatagatatacgcgagcgatgcggaccagttctggttgaagcggcgtcccacaccgatggtgtaggttatggagtcatccagatcgatcagatcacggccaccaagcgcactaagcaccacaagatcggtgacactgtgctcggcccagcggatgccaccaaagacgatggtgtccttggcaacgccggactggaagtcgaggttcacagactgaggagtcttggtggtggtggtagtattcagcgtcgtgccgccgatcaccggaacgcctgcaggcgttgtttcggtgagattgaaatcatgctcgatttcggactggtaggtcagggcaaaccgcagcgcgatgtctgggatctcgtaggcaacaccggcaacccagccaaagccgccttcgcggtccactttcacgttgtagccggagaggggaaccgtggcgttataggctgcgcctgccagggtgatctcgccgtcgatctcctgatagcgcagaccgccgtgcacgctgaagcgatcattgagcttatagcgcagcagagcggtgatggcattggaatccgcttgcgccatggtgccgccgagcagtgcggatccgttggtggtcggatagtccacgtccacgccccagggctggtcgtagatgatggccagagacagctcatcattgatgtcggtcttgaagccgccgctaagcatgttgaaacgctcgccaacgtcgccgcttgcggaaccggccgggttgaggcttgtgcggtcgttgccgctcaggtcaaccgatgtcgtggcaaaggaaaactccgcataggtgccttcctcgaaaatcagtccgatcggctgtccggtgcggtccaagccgctcgccatcgccgtggtcgccagaagcgtcgaagcaacggatgccgcgatataatgtttcataaagatcctccctcaggcgcgtcgcgaaacgatgttgcgcagcgcttactggggaaaatcgtaaaagaaatgtcacaaatctcgcaatgttgacggggcggcagcttgtggcgcgactgtgcgtcacatggcctactgttgccgagaggatacaatatttatgaaattcccgatgagaataagtgccgcacccacaaagagccagatctctaccgactcgccgtaaatgagccaggccagaagggcgatgaagggcaatcgggcaaaatcaatcggcaccaccaatgcagcgggcgccagcgaaagcgcgttggtgatgcagaaatgggcgctgagaccggcgcagccgatcaccagaagatacggcaggctctgggcatcgggcagggcgatatccatgtcccagcccgcaaagacaatcccaagcaccagctgcatagcggtgagccaaaacatgatcgaccagatgctctcgctgcgggtcaggcgtttggtcgcgatgttggtcagcgcaaagaacaccgccgatcccgccgcacaggccagaccaatgttgaatgtctgcgggcttggtcgggccacgatgaggatgcccacaaagccaagcgcgacagccagcgcacgcatccgggtcagcttttcgcccagaaacagcggcgccagcaggatcacccagatcggagaggtgaattccagcgcaaagacttgcgccagagggatcacggacaccgcgtaaaaccacaggttctgtccggtgaaatgcgccatgttgcgcaggccgtgctgcgtgagccgctcggagctgaccaagtgccagcgccgcatcagcgtgatcgcgccggcaacgacgagcaccccgacaaggctgcgatacatcatgatttcaaaggtatcgagcgtgagccccgcctcgcgccccgcgatagccatggcagaaaacgacagaatcgccccgatcatccagatcgcagcgcgcagaagcgcgttttgctgggcagcggcggagtctgttgcggtttgggtcatggtgcaccggtttgtttggtgcagagaggcgacaaaaagcgcgggaggtcaacccccgggggatgacatcctggcgcttcgcgctcctcggtcttttgaggcggagcccgtgggggtcagaaatgaaaagccccggtgcgcagcaccggggctcgtatcagacttgggcctgagatcattcccactcgatcgtgcccggaggctttgaggtgatgtcataggtgcaacggttgatgcctttgacttcattgatgatccgcgttgcggtctcaccaaggaactcatggctgaacgggtagtaatccgccgtcatcccatcgaccgaggtgaccgcgcgcagggcacaggcgtagtcataggtgcgaccgtcgcccatcacgcccacggtgcgcaccggcaggatcgccacaaaggcctgccagatctcatcataaagaccgtgtttgcggatctggtcgatatagatggcatccgcttcgcgcaggatgtccagcttgtcgcgggtgatctcgccggggcaacggatcgccagacccggtccggggaaggggtgccgtccaataaagctgtcgggcaggccaagttcacgcccgagcgcgcgcacttcgtccttgaagagctcgcgcagcggctccaccagtttcaggcccattttttcgggcagaccaccgacgttgtggtgcgacttgatcgtcaccgaagggccaccagagaacgagaccgactcgatgacatccgggtagagcgtaccttgggccaggaactccgcgccttcgatctgatcggcgtatttctggaacacgtcgatgaacagcttgccgataatcttgcgcttggtttcggggtcggactgaccttctagctcaccgagaaagagctcggtctcatccgcgtggatgacctgcaggttcatgtggtcgcggaacatgccgacgacttcttccgcctcgttcttgcgcagaagaccatggtccacaaacacacaggtcagctgatcgccgatcgcctcgtggatcagagccgccgcaacggaactgtcgacgccacccgaaagggcacagatgactttcttgtcgccgacctgctcgcggatggtttcgaccatctgctcgcgataggcgcccatggtccagtcaccgctgaacccggccagacgcacgaagttttcatagagcgtcttgccgttgggagtgtgatgaacctcggggtggaactgaacagcgtagaagttgcgctccagatccgccgtgatcgcaaatggcgcgttgggcgaggtgccgtagaccttgaaaccgggtgcgatttcagagacatggtcgccgtggctcatccagacctgttccgtctgatccaggaaccagccgctgagcatgtcgatgcgctcttcggtgggtgtcacataggcgcggccaaattcggcggttccatggccggattgaacagtgccgccaagctgatgcatcatcacttgctggccataacagatgccaaggatcggcacgccgtagtcaaaaatctcttgcggcgcgcggggagagccttcgcgcgtcacgctgtcgggaccaccagagaagatcaccgccttgggcgcgaactcgcgcacgaagtccatggtgacattctgataggggtggatttcacaatagacgttcaactcgcgcaggcggcgcgcaatcagctgcgttacctggctgccgaagtctataattaaaaggcggtcatgggctgtctcggtcatgcttggctcttagggtctggcgggacgtctggcaagaggtcagatgggctgtggcggggcaaattctctctccgagtccggaaattctactccggaatgtcgcatttatgcgagaatagccgttatccttcggcgcggcccagtcttgctccgataatcagaatgcacagaattcatactgtcgtgaggaagaacaatgacggatgcagcaccgcgtcgtcgaagccggggtggcggtggcgccgcccgtcgtgccgaacgcaccagcgtcaagatcgagacagcgaagtatatcgagcgcaatatcccgaactacgaggtgctgacagaagaggcgctcgaggtcatcgagacaaacgccgagaccatcctcgaggaggttggcgtcaatttcgtggataacccggccgcgcttgaacgctggcgcgacgcgggcgccgatgttcagggcgagcgggtccggatcccgcgtggtctggcgcgcaaactctgcgaaactgcgccgagccagtttacccagcacgcgcgcaaccccgagaaatccgttgagatcggcggcaagaacctcgtgctcgcgccgatctacggcccgccgtttgtgcgcgatgccaatggtggccggcgctacgcaacgctggaggatttccagaagttcgtgaagctcggctatatgtcgaaatggctgcatcactctggcgggaccgtctgcgagcccaccgatgttccggtgaacaaacgccacctcgacatgttgatggcgcatatcgagctctcggataaacccttcatggggtcggttacggaaccgagccgtgcgcaggacaccgttgatatgtgcggcatcctgttcggcaaggatttcgtgcaggaaaatactgtcaccacctcgctgatcaacatcaactcgccaatgacgtttgacgatgtgatgatgggcgcgcttgaggtttatgccaagaacaaccaggcctgcatcatttcgcccttcatcgtgggcggtgcaatggctccggtcaccatcgcgggcacattgacacaggtcctggcagaagttctggccggtgtggcctatagccagctgatccgtcccggtgcgccggtgatcttcggggcctttgtgtcgtcgatcgatatgaactccggtgcgccgacctttggcacgcccgaagcctcgatggtgacctatggcgccgggcagctggcgcggcgcctcaatctgcccttccgctcggcggggtcgttctgcggctccaaactccccgatgcgcaggcggcctatgagacggcgaactcgctcaacatggggctcttgtccggcgtgaacttcatgctgcattcttgcggctggctcgaaggcggtctggtggccgattttgagaaattcgtgatggacgccgatcagctcggcgtgctgcatggactggccaaaggcatccagatggatgaaaacgggcagggccttgatgcgatccgtgaggttggcccgggaggtcactacctaggatgtgcccatacgcaagcgaacttcaaaacggcgttctggaagtccaacctcctggattacaagccttttgagcagtgggaagaagaaggcgcgcgcgacacctacaaacttgcctcggcgcgtgtggaacatctgctcgccacctacaaacagcccgaactggatcccgcgatccgtgaggcgctgatggcttacatcgcagaaaagaaagcctcgatgcccgacgcctttatgtaagcgatccgtggtattgagttcaaacggcgtcctgcggggcgccgttttttgttgcgcgtcggggctgcgagcgcgacgccagatagagacggctttcggcgctcaacgccgtgaggactgcgacatgacgggcaaaggaatagccgggattctgccctaagcgcgcgcgctcctgcgtggcttcgaggtccaaaagctgcatcaggattgcgccggtgccctgcgatggcgtcgacggcagcaggcgtttaagatcgcgctgacggatatagtcatccgccccaatacgcgcggtccgcgccagcagacgtgggcgatgaagcgtggtaagccgtgttctaagatcctgcatgacaattccccgagcctgagtgaacaacaggggcaatagtaaacaacctaaacgggtgttgcgcaaatcagcatgtgagcgaacggtccatttccaatagctttgacaatttgtggcaatattttgaaattgccgaagttttaacgttcaggaatggggagagatcaaggtcatgatgcgtgtcatccggccggtgatcggtggcgtgggcctgggcaaagctaggggtcagctatgaatggagtaacccggccgtgtctgccggattgggtacctgttgaaatctctcgttatctcgcgcacacggtctctcagatttcgatccgcgaactggcgcgcagcgcggcgtgtcacccgtcgaccgttatgcgccagatccaccgtgtcgagcaactgcgcgaagatccattgatggacggcgcattgcagcgcttgtctgaactctgtgatgcggattcagatccatctggggaaatttcccattacaaagaagaagatgcagtgcgaagtttaacgcttctctcatatggtggtgcggtgcttgcggttgggcgggatatgcccaaggcggtgatcctgcgcgaggtcgggtccgaggtgcacaaaaccgtcatagagcgtagccttgccgaaatccttgcgctgcgcgattgggtcagctgtttttcctctggccgcgtctatcgctatcggctcagcaaggacggtcgtagcgcacttgcccagctgacagcaaaggccgaggcgtgtcaccgttcacgcatggaaacgacaacgcaatcgggccttgcaggacagattgcggagttttcacagtctgacgctcttaacgcaaaacgagcgcggtatggccagcaggacacaccgttgcaaacccttgcgcggttggtagaccgtgatggaaattcttttctgagcaaagagatggtacgcgcaggtgaacgattaagagaagatttcgaactcgcgcagattggtcagcatgtcgccacggagcgccgggtttttgacgacaatccgcgcgcggcagagcatgctacgggtccgacaaacgccctcagccgcgacgccttccagcgcgccacaaccgcgctgtgtgcactcgggccgggcttgagcgatattgccctgcgctgctgctgtcatctcgaggggctcgaggtggcggaacgcgaactcggctggtccgcaaggtcgggcaagatcgttctcagaattgcgcttcagcaattgcatcaccactatgaatctttgccgccgcaaacccaaatgatcggatgattgctgtttcaaatgcggatttcattctgccttgggtggtaaaagtttcgggcaagtgtccgcgcgcctgagttccaagtccgttgcagaaccaagagcgacacatcgttattgcgaagcggcactggtggagcagggcagggactgttatgttgcgcccaaatacctgtcgcagtcacaaggaagaccctgtgagagatctgaaaatcccggaacagcgccacccggaaaaggcgcaccgtcccgataatgctcagcccaaaaagccaagctggattcgcgtcaaggcgccaggtggcaagggctatgccgagacgcataaaattatgagggaaaacaacctcgtaaccgtgtgcgaagaggcgggctgccccaatgtgggcgaatgctggagccagggccacgcaaccatgatgatcatgggtgaaatctgtactcgtggctgcaccttctgcaatattgcaaccggtcgccccgacactctggatgcgtttgagcctgggcgcgtggcgcatgcggtgcaaaaactcggcctcaaccatgttgtgatcacatccgtggaccgcgacgatctagaggatggcggtgccgatcactttgcgcaaacgatccgcgcggtgcgtcatcgctcgccgcagaccacgatcgagatcctcaccccggactttctgaaatgtgcccctgaggtgctggaaacggttgtcgaggccaagccagacgtgttcaaccacaacctcgaaaccgttcccgggctctatcccgaggtgcggccaggtgcgcgttatttccactcgctgcggttgttgcagcgcgtcaaagagctcgatccgagcatctttaccaaatcgggcatcatggtggggctgggagagcaggcgcctcaggtgaaacaggtgatggatgacatgcgtgcggcggatgttgatttcctgaccatcggccaatatctgcagccgacgcccaagcaccatgcggtggatcggttcgtgacaccggaagagtttgagtcatacgaaaaagcagcctatggcaaaggctttctgatggtgtcggcaacaccgctgacccggtcgtcctatcacgcgggcgatgatttcgccaagctgcgcgcggcgcggaatgccaagcttgggcttgcatgacgcctgacgaactggatcggttgatcgcactgcgccatgcacttcattcagcgccggaactctctggcgctgaacaggaaacggctgcccgcatcctgtccgagttgcagcgcctcaaccctgatcagatcctaacagacattggcggccatgggatcgctgccatctttgacggcgtcgcgcccggcgcaactgttgcaatccgctgtgagctggacgcgctgccgatccaggaagaaagcagcctcagttacatctctcaagcccctggcaaagcacatctttgtgggcatgacgggcatatggtcatggttctggccgtggccgaggagatgacgcgtcagcggccagcctcagggcgtgttgtgttgatctttcaaccagcagaagagaccggtcagggggcgaaagcctatcgggaagatacaaagttccccgagatccgacccgacatggttctgtcgctgcacaatctgccggggctggagcttgggcatgtctctttgccggtgggacctgccaattgcgcctcgcgcggcgcgcggatccggttgacgggccggacctcccatgccgctgcgccacaagatgggcgctctcctgcgctggcgattgcgcagctgatgcagaagcttgcagcgctggcgacgggcagcgcgttggatgaagactacgccctaaccaccgtaacacacgccactttgggcgagcccacttttgggatcgcacccggggtgggtgaggtttgggtgactcttcggaccgcgacggatcgcaagatgcaagagctcatcgaagctgtgcagatcatggtcgagagcgccaccgcggatcttgggcttggtcatgtgatcacctatcacgatgtttttgacgcctgtacaaacgctcctgatgcggttcaggtgatcgaagccgcttgccacgcaggcgcggttccaatcaccctgaccgagagcccgcaggcgttttccgaagacttcggccagtttgggaaatctgcccggaccgcgatgttctggttgggggcaggagagagccatccccaattgcacaatcccgattatgattttccggatgctctcatcccaatcgggtccggaatttttattcgcgcgatccgtcagctgttggggtaggctcagcgctctgccagaatgcggtcgtgtgatcagtcgatcagggcatcgacaacggcgaccgcgcccacgatggcgagcgtgtctttgaccacctcaaggatttccccatccttgcgcacatagtgatggccgggagcagggggctgcagtccccagcgctgatagtcagtgacatagtcccaagccccgctcagatactggtcgtgcgcgtgaagcttcttgacttgtcccggcgcgtaatgcgcggcgctgtttttatgacctggtgcccatttgggtggaccggccagcgcggcgagcggtgcgagggtcagccctgcaatcgcaaggctggggatgagctttgaatatgacatgcgacgctcctttgaacggtaggttgcgtcagtatatgtcgcacaggccgttcggagccaaatctcatgcgccagatgccgccggttgcatcaaggcaaaccggcaaggctttgctggtctggggtcacacttcggtgaagcgcactttgccaatgtgaggcaggttgcggttgcgttgggcaaagtcgattccgtagcccacgacaaattcatccgggatctcaaagccgatccaatctgcgcgaaagtcgacttcgcgacgcgagggtttgtccagaagcgcaatggatttgagacgcgcaggcttgcggctcttcaggagcgagatcacatggttcagggtatggcccgtgtcgacgatatcctcaaccaccagcacatcgcgcccttcaatagcgccacgcaagtctttgagaatgcgcacttctcggctgctttccatgccgtcgccataagaggacgcctcaaggaagtcgacctcgatcgggagatccagctcacgcaccagatccgcgataaagacaaaacttccgcgcagcaggcccacgaccacgagcttgtcggtatcgccaaactcggccgtgatgtcgccgcatagctcttcgattcgtgcagcgatggccttggccgagatcattacatcaatgacatatggtcgctctgacatgcttgcccccttgaatttcgcacgcgttcataggacaccacgcgccacctgtacagaagacgaatggacccgcgatgccaacacattcggaaacccgaccgatgccctatagcgcccagcagatgtatgatctggtggccgatgtgggatcatacccgaaattcctgccgtggtgcgctgcagcgcgcatccgcagccgcacaccgcagggcgcatccgaggtgatggaggcggatctggtgatttccttcaaggtgttccgagaacgctttggcagccgtgtggtcctgcatcccaatgagcacaagatcgacaccgaatatcttgacgggccgtttcgctacatgaagtcaaactgggcgtttcaggaccgcgcggatgggggctgcgatgtcagtttctttgtcgactttgaattcaagaacgccgtgctacaggggatcatcggggtcgtcttcaacgaggcgatgcagcggatcgtgcgcgcatttgagcggcgcgcggcagagctttatggctgaccacatcaggctctaacaaggcggattgcgccgtcaggcgccgctgtcgctgagcgcctgcatcaacatcgccagcgcatgatcgcggctggcgaggcgcaccttgtcccggcctagcgcgccaaactccaccagttccgttctggtctcggccccgatttgtgccagaccgaagcagacgcgcccttcgggcttatgctccgagccaccgggacctgcgatgccggtgacagagatggccagttgcgttccggcttccttcagcgccccatctgccatctcgcgcgcggtttcttcgctcacggcgccaaactcccgaagcgtctcgggacggacgccgagcatctgcatcttcgcggcgttggaataggtcacaaacccacgatccaccaccgcagaggagccgggaatatccgtgagcgccgccgcaaccatgcctccggtgcagctttcggctgtggcgatggtggcattctttgattgagctgcgcgaagtaagtctttgatattcatagcccaagcaccccatgggagaggcctgcaagcatcgcgacccctaccgcggccataccaccggctatgacatcgtccatgacaacgccaaagggacctttcttgcggtccgcccagcccaccggcccgggcttccagatatcaaagagccgaaacagcaaaaatcctgcgacccaaccgggccagagcgcggtgatctccagtccatgcaaccaggccggcagagatatggcccagagcgcaagcatctgccccgcgagctcatccagcacgaattccgaagggtccagatcttcctggccgcgggtcatttccttggccgcccacaggcccacaagaacagaggccacggtaaaaacggcgagcagaggaaagccacccgtgacatgcaacacataggtcaacggcagcgcggccagtgacccccaggttccgggcgcagggcgaaaataccctattccgcaacaggttccgagaagttgtggaagtgtcatgcccgcaccaatgttgctgtcgccagtgccgcgatgccttctttgcgaccggtgaacccaagccgctctgaagttgtcgccttgatcgagaggcgtcccatatccatgcccatgatctctgccatccgggcgcgcatcgcctctgcgtgggggccgactttggggtattcacagacgagggtgcaatccacgttattgatggtgaaccctttggagcgtgccaattcgaccgcatggcgcaggaagatgtccgacgccgcgcctttccactgagggtcgcttggcgggaagtggcggccgatgtcgccctctgccatcgccccgtagagtgcgtcggtgaccgcgtgcatgcccacatccgcatcggaatggccttgcagaccgcgctcatgcggcacttgaaccccacagagcatgacatgatccccgggtccgaaccggtgaacgtcatagccatttccaagcctgatgtcaggaatgttgtccatggtgctcctcaatatgtgctcggcgcgggagaaatcttcgggccgggtgatcttgatattattgacgtcacccggcgtgatacggaccgcgagccccgcttgacgggcaacctcgacatcatccgctgcggtgccgtcgtggcgcatatgcgccgcaaggatcgcgtcaaaatgaaagccttgcggcgtttgcgccgcaaagagcgcgcttcggtcctgcgtgcctgtgacatggccatcggccccggtccaaagcgcatctgtcaccgcaagtcctggcgcggcagcaggcgtgtcatcaagtgcgtcgagcacctgttggatcacctgaggacacacacatggacgcgccgcgtcatgaataagaacgcgttcgacaccgatctcttggagcgcaatcaaaccgttacgcacggattcagaccgcgagggaccgccatctgcgagcaataattcagggtagggcgcaagcgcctcgatcgcgtgctcattgtcgggatcgcgcacaaccatgatggtgccgcaccccgcacgttgaaaggcctcgatcgtccagtcgatgaccagtcgcccggccagtgggcgccattgcttggcgagaccaccgcctgcgcgggtgcctttgccggcggcaacgatcaatacggcgagggtcatggcgcggtgttcgtcctgtgcatgagcaacttgccggcgtgtttaagctgcggcggataaagtagcaatgtttcgagcaggtgtgattaaaaaataggcatacagtgtcatgagcagggctggaatggcgtgttggaatggagcatagctccgattcaagctaaaaaacactcgtatgcataaggattaagcagttgtccttttcagttggacccacacatctcgatccccccgtcgctctggcgcccatggccgggatcactgaccgcccgtttcgggatctggtgcgctctttcggggcgggcctagtggtgagcgagatggtcgccagtcaggagatggttcaagccaagcccggcgtgcgcgagaaggcggaactgagcgccgatgtggagaatacctcggttcagatcgccgggcgcgacgcgtattggatggcagaggccgcgcgtcaggtggcagatcgtggggcgcggatgatcgacatcaacatgggatgtccggcaaagaaagtgaccaacggctattcgggctctgcgctcctgaagacccccgatcacgcgctgtcgttgattgaggcagtcgttcaggcggtggatgtgcctgtcacgctcaagacccggttggggtgggacgataactgtctcaatgccgctgatgtggcgcgccgcgccgaagccgcgggtgtccagatggtcactatccatggtcgtacccggtgccagttttacaaaggtcatgctgactgggctgcgatctcggagatcaagaatgcgatctctgttcccttgctggccaatggcgatattgtcgatgcaaaaagcgcgggcaaggcgctctcagactccggagcggatggcgtcatgatcgggcgcggtgtgcagggaagaccctggcttctggctcagatcgcgcatgatctctggggcacggctgctccggacgttcccgaagggcgcgcatttattgatctggtttcaaagcactacgaggcgatgcttgccttttatggggcggagttgggcctccgcgtcgcgcgcaagcacctaggctggtatatggatgaggccgggacacctgcggccctgcggcgcgaggttctgacggccaaatccccctctgatgtgttgcgattgctcccgagtgcgcttcagggaactgagcaggagactgccgcatgaatgatgcctcgaatcctcacagcaacgactgcgacatctgggcttcgctgccggtacccgcgtttctggtcgatgagcataattgcattgaagatgtgaactcagctgctgagggctttatcaactcctcgcgcaagtccctgattggtaagaaaatctggcagaaggtcgcgattgagtcctcgatcgaactggcctttgacaaggctcgagagcagggcacgcccctatttgtgaatgatgtcgatgtcggcgcccgcgaacgcgcaccgttgcaatgtgctgtgcagattgcgccgctccacgggcatcctggtcatatgctgctgatgctctcgccgcgagagcttgcggggcggatgacgcagacccactccgccaaatcggccgcgcaatcggcgatcggcatggcagagatgctggcgcatgaaatcaagaaccctttggcggggatcaccggtgccgcgcagcttttgagcatgaacctctccacggatgaccttgaacttacggatctaatcgtgagtgagagccgccggatcgtgaagctgctggagcaggtggagcagtttggaaatctctccgagccggacttcaaaccggtcaatctgcatgatgttctggaccgcgcgcgccgctccgcgctgctgggcttcggcgcacatatgaagattgtcgagaaatacgacccctcgctgccgctggcctggggcgacccggatcagctgttgcaggtggttttgaaccttctcaagaatgcctcagaggccgcaggcagcgcgggtggcaccattacggtacgcaccttttatgaacactccttccgcctgcgtcgcagcgacggacagggcaagctgctgcccttgcagatcgagatcagcgacgatgggccagggctgccggagaagatccgcgacgatatctttgagccttttgtctctggcaaggagaacggaacaggtcttggcctggccttggtcagcaagatcatcggcgaccataacggttggatttccgtgcgctcagagcccggcaacacgaccttcagactgtcgctttcgcgcgttccgcgagagcagaaataactcaggagaccaaagacatggatggcaccgttcttgttgcagatgatgaccgtacgatccgcactgtgctcacacaggcgctgacgcgggcggggtgcaaggtccatgcgacgtcctctctcacaacgttgatgcgctgggttggcgaaggcaaaggcgatgttgtgatctccgacgtgatgatgccggacggcaatgggctggagatgctccccaagattgcccaggaccggcccgggctgccggtcatcgtgatctcggcgcagaatacgatcatgaccgccatcaaggctgccgaagccgaagcctatgattatctgcccaaaccttttgacctgcctgagctgatgaagcgcacggccaaggccctcaccgaaaagcgcagcgcccagagcaccagccatgtcgaggtcgtcgaggagcgacccgatgagctgccgctggtggggcgcacagaggtgatgcagacgctctatcgtctgattgcgcgggttatgaacaccgatatgccgcttttgatcacgggcgagagcgggtctgggaagtccttaattgccaaggcaatacacgatttctcggaccgcaggaccctgccatttgtggtcgctgaggcgtctgatctcatcgagcttgaaggcccctcgcgcctgctcagtcaagtgaagggcggcaccttgctggtcgatgagctggttgatctgaccgatgaggctcaggcgcggcttgtgcggatgatggattcgcccggagaccacgcaccgcgctttattgcgacctccagtcagcaagatcttgctgaacagatcgaagccggcaaactgcgtcaggatctctactaccggatttgcggtacggagcttgcggtgcctgcgttgcgcgaacgggtcgaggacatcgcacttttgtgtgagcatttcctgacccgcgcggacgccgaaggggggccgcgacgcatgctgagcgacgaagcgcgggatctcttgcggcactattcttggcctgggaacgtgcgtcagcttgaaaatatcgtgaaaagactggcgcttacagcgcgcggagatacaatcagcaagtcagaagtcgccgcagcgcttgggccgcagagcaccggagttgcgcccgtcatggggggcggggcaagcaatgaaaagctctccgaatctgtggcgcgccatctgcagcgatatttcgatctgcatggcgacatgctgccaccaccggggctgtatgcgcggctgctgcgcgaagtcgaagcgccgttgatcgagatctcgcttgctgcaaccggcggaaatcaggcgaaatgtgccgatctcctcgggatcaaccgaaatacgctgcgcaagaaaatcactgatctcgatatagaggtgacacgccgccgcaaactgatgtaatatcgccacagcagcgttgcccggaggtcaataggcccatggggcaacgcgagatagtgtggtgagccaagaaggctcaacatcaactgggggcaggcggtggcacagttgtcacatatccgttcggtgtatctgtggcttggcgccctggatcgctggcgtaagacgcgccgcgcgcgcaacatcaccaccttggggctggtgttgctcgggcccatcatggctttggtgacatttcttgtgatcggtccctttggccagaatgcgagctccccggcgctgcgcctgatcctgctcgctgatcttgtctatgtgctgtcgattgcagcgctggtcctcagccagatcggacgtctgatcgccgcgcggcgtgagaagtcggcgggctcgcgtctgcacctgcgattgatcggcgcctttgccttcctcgcgctggtgcccaccgtgacggttgcggtctttgctgtcttgacggtgaatgtgggtcttgagggctggttttccgagcgcgtgcgcgatgtgattggcaactcggtcaaggctgcagaagcctatgaacgccagcagcgtcaggatctcgaacaggatgcgctggcgctggcgcgttttctggatcgaagccggaacaagaatttcttcatgagcgacgggcagttgcggcaggttctgtcgcaaggccagctgcagatccagcgcggcctgcaagaggcctatgtgatcaatgggatcggggcgatccaaacccgcggggagcgatcctacgagtttgacttcgaagaacccactgatgcacagatcgcagccgccgaatccgaggggctgcacctgatccaggattgggacaatagcgagtttcgcgccctggtgcgtctcaacgcctttgtggatcggtatctctacgtcagtcgtgaagtcgacggtgaactgttgaacctgctcgacgacactcaggaaactgcgcatctttatcaacaactcgagagtgagcgcgggcgggtgctatttgaattcggcctgttgtatctcggctttgcagtgatcctgatccttgcggcgatgtggcttggcatgtggtttgcggagcgcctttcacgcccggtcgggcgcttgacggttgcggcgcagcgtgtgggcggtggcaatctgagtgtgcaggtggtagaagagaacggcgacgacgaaattgcgcaattagggcgttatttcaatcagatgacgcagcaacttcaggcacaacgtgaaaccttgctacagaacacgcatcagatcgagcagcgccgtcgtctgtttgactcggtgctgtcgtcggtgacctctggcgttgtggggcttgatgcaaagggctgcgtgacctttgtgaacacctcggccaagcgcttgctggattggcgtgaggaccaaaagtcacttgcacttgcggtggccattccggagtttggtccgctgtttgacgatctcgtcaaaggcggcagcaacaatgcccagggtgagatcaaagtaacccgacaagggcagttggagaacctccttgtgcggatgtcgcgccgacacggcgatgacaatacgctcgagggctatgtggttgcctttgacgatgtcaccgatctcgtgagtgcgcagcgcatggcggcatggggtgacgtggcgcgccggatcgcccatgagatcaagaacccgctcaccccgatccagctcagcgcggagcggatcaagcgcaagtttgctccaaaactcagcgaagagcagagcgatcaactgcagtcgatgaccgatgttattgtgcgtcaaaccaacgacttgcgtcgcatcgttgatgagttttcaaaatttgcacggatgccggaacccgatcgacacgaagaagacctaggcgcgctggtgcatagtgccgtgttgctgcagcaagccgggcaacctgatctcaagatccacgcgcagatcccggatcatccgctgaacgtggatgttgacgccacaatgatcgggcaggcgctgaccaatcttatcaagaacgctggcgaagccacggagaccttgcgcaagaaaggcgtagagccgggctacgcgccggagatccgggtcgatgtgagcagcgatgatagcgggtttgtcattacgattgcggacaatgggatcggcttgcccgcagatcgcgcccggctgtttgaaccctatgtcaccacccgtgacgagggcacaggcctcggcctgccgatcgtaaagaaaattatcgaagagcatggtggcagtttggtgctggaagacgcgcccatctttgacgggatgagccaccaaggcgcaatggcggtgatccgtctcccggcgctggcgccaggaaatgccgtccagaaacaaactatagtagcagggctgacatgagtgatattctgattgttgatgatgaacgtgacatccgggagctggtttcagacatcctggaggacgaaagctatgccacgcgcaaagcggccaactccgaagaatgcatggccgcctttgaagacgctccgcctgcgctgctgattttggacatctggctcaaagacagccagatggatgggatcgacatcctgaaaaccgtaaagcgggattacccggaggttccggtggtcatcatctcggggcacgggaatatcgaaattgcggtcgcggcgatcaagcagggcgcttatgacttcatcgagaagccctttaatatcgaccagttgatggttgtgatccggcgcgcgatggagacctctcgcctgcgtcgcgaaaacacggatctgcgccgcaaggatgtaggtgcaaccgatatggtcgggacgtcgcccgcgtttcgtgccttgaccagccagcttgacaaggtgacgaaatccaatgggcgcgtcatgctcaccgggcctgcgggcagcggcaaggaagtagcagcccgctatattcacgcaaactcccaccgcgccagtgagccttttgtcaccgtgaattgcgccagcattgagcccgagcgcatggaagatgtgctctttgggcgtgagagcagcgaacgcggcgtcgagccggggctgctggagcaggcagatgggggcgtcgtcttttttgacgaagtggcggatatgccccccggcacccaatccaagatcctgcgcgtgctggtggatcagcagtttgtgcgcgttggcggcaccgagaaggtcaaggtggacctacgggtgatctcggccacaaatcgcgatctcgaacaggagatcaaggatggcaacttccgtcaggaattgtatcaccgtctgaatgtggttccgatctgcgtgccatcgctctcggaccggcgcgaggacatcccgctgctggcggagtatttcatccaaggcttcaaccagacgcagggcctgccactgcgcgcccttagcgaagacgccgtggccttgatgcagacgatgacctggccgggcaatgtgcgccagctgaagaatctggtggaacgcgttctgatccttggagaaacctccggtcccattcaggcaaaggatctgccgagcgaagaagaaaaggtcgaaacagaaggtcgcgtcgtgctctctggcgccttggctacgctgcctttgcgcgaggcacgcgaggcctttgaacgcgaatatcttctgacgcagatcaatcgctttggcggcaacatcagccgcacggcctcctttgtgggcatggaacgctcggcgctccaccgcaaactgaaatcgctcggcgttgtcacatcgaacaaggcgggcgcgcgggtggcgcgggtcgagagcgaggaagccacggaagagacagcgtaaatcaggtgtaggccagggctgcggcgggacaattgaattgacccccttcgcaccatctggcatgcaaatcaggcagtccagcgcccggagagcggatctatgaaagttatcatctgtggagccgggcaggtcggttggcagatcgcacggcatttgtccggcgaacacaacgacgtgacggttgtcgacaacaatcctgaccttgtgcgccgcgcgacagatacgcttgatgttcaaggcattgcgggctttgcctcatatccggatgttcttgatcgggccggggcgcgggacgcggatatgatcatcgccgccacgcactcggacgaggtgaacatggtcacctgccaagtggcgcattccgtgtttgccatccagcgcaagatcgcgcgtctgcgggccaagagctatctgaacgcgatttattccgatctctatcgccgggaccatctgccgatcgatgtggtgatcagcccggagcgggaagttgcggcggcggctatgcagcgtctgcgcgcgccggcagcttttgacaccgaagtattcatggacggacgtgcgcagctgttgggcatcaacgtggaggcagactgccccgttgtaaacacgccgctgcgccagttgacggagctcttctcgacgttgcgtgccattgtggttggcattcgccgcgacggatcgctgtttgcgccggagccaggggatcaactgtttgtgggcgatgcggcctatgtgttttgccatgcagacgacgtgagccgcacgatggaagtctttggaaagactgagaaacgtcaggagcgcgtggtgatcgtcggcggcggcaatgtcggccttgaagttgccaaagcgctcgaggcgcgcacccggcgcacgcgggccaagatgatcgaaaagaaccgcaaaaacgccgaggttgccgcagaggctctggaacgcacgatcgttctgaatggcgatggtctggatcgggggctgatgatcgaggcgggcatcgacaaggccgatgccatgctggcggtgaccgatgacgacaagaccaacatgctggcagcggtgcgtgccaagaccgaaggctgcccgtttgcaatcgccctgatcaacgacccgacgctgctgccgctgctgccgcacctcgggattgacgcgcatatcaatccgcgcgccaccaccgtcagttctatcctgcgtcacatccgctatggccgtatccggcaggtttattccattggcgacgccgaagcggaagttattgaaaccgaagtgctttctacctctcccatggcggggcaggccattcgggacattgatttccccgaaggtgtgctggtgggcgctgtatccaagaacggcgaggtcatgcgccccagtggcgggcttcggatcgaggcgggggacacgattgccctctttgcgatggccgctgatgtgcgggaggtcgagcgcctgatgcaagtctcgatcgactacttctaggatgatacgccgccccctgaaacaagtgcgcggtgtgctgcgcttgccgctgctgctgctcatctggggggtgtttgccattgcgatgtggatcccggccgtacatgcggtgattgtggatgaccaccagacatcgcagagcttcttttattccgggattgtcgggctcacgttggtggcctttgtggggctttcggtttcgaaccgcgtgccgcgttacgggatgccagggcagcttatgaccctgctcgcgacttttgtgcttttgccgctctacctcgccattccgctgcaggatgcgttgaaaaacacaagctatctcaatgcctatttcgatatggtctcggcgctaacgaccacgggggccgatatttttgaccgtcctggacgggtgccggactcggtgcacctgtggcgggttctggtggcgtggcttggcggcatgttcatgtggattgcggcctcagccgtgctggcgcctctgtcgctcggcgggtttgaggtcaccacgcgcgcagaacccggtcgcagcgatgcaatcctgcgcgaaagccagcgccccgacccgcggcgtaagctgatcatcgtgacccgtgcgcttgcgccggtttatgcgggcctgacctttgcgctggctcttttgctcatgctgtgtggcgagagcggccttgtcgccgtcagccatgccatgtcgatcatggcgacctccggtctgtcgccgattggcggcattcaggatgcacaggcgggcctcgctggcgagatgatcatgttcctttttctgctgtttgcgctctcacgcctgacgttttccagcgatacagtggctgtggggcatgggcgtctcgacaaggatcccgagttccgctctggcattctcatcattctcggcgtgccgatgctcttgtttctgcggcattggctagcctcgctcgaggtgaatgcgtctgacgattggggcatggcgctgacctctctttggggtgcgattttcaccgttgcctcattcctcacaaccaacggatttgagagcgcgtattggttcagcgcgcaggaatggtcgggactggagacaccgggtatgatcctgctcgggctggcggtcatgggcggtggcgttgcgaccactgcaggcggcgtaaagctcctgcgtgtctatgcgctatatctcaatggtcttcgggaaatggagcgtctggtcctaccgtcctccgtcagtggtgaggggcggggcaatcgacgcctgcagagcaatggtgcctttgtggcctggatctttttcatgctctttgcgctgtccttgacgctcatttcggtggcgctctcggcctttggtattccgtttgaacaggctatgattctcgccgttgcggggctttccacaacggggcctttggtggaggccgcagggcaggttcccatcgagctcaatctgctggatgcccccgcaaagctgatcttgtgttttgcgatggttctggggcgtctggaaacgctggccattatcgcgcttctgtcgcccaatctttggcgcaactgacacatactggctaagtcatgcgaaaaagtgacgtttttcgggtggaaacccgcgaaatctgcgtccatactcgccataagggacgcgttgggccgcagcgcgtggcaagaacaaaggcgagataataagcaaatggcttcggacagacagaatcttcaggacgctttcctgaaccacgttcgcaaaacaaaagttccagtcacaattttcttgatcaacggtgtgaaactgcagggcgtgatcacctggttcgacaacttctgtgtgttgctgcgccgcgatggccagtcgcagcttgtctacaagcatgcgatttccaccatcatgccggcccagcccatcagcctatatgaaggtgaagactccaattgatggagcatgacaggaagcagacccgggcttgggttctgcatccggatatcaagtcagatagggatcgtcgcgacgcagttccggcgctagaggaaggtgtggcgctcgccgccgcactgcccgaccttgaagtggtcggctcaactgtcgtgggccttcccaaggcgcatcccggtatgctgtttggctccggcaagatcgaagagctgaagaccctgttcaaagccgaagaggtcgaactggtcttgattgacggccccgtaagcccggtccagcagcgcaacctcgaaaaagcctggaaggtcaaaattcttgaccgaaccgggcttattctcgagatcttctcggatcgtgcgcgcacccgtgagggcgtgctgcaggttgaaatggcagcgctcagctatcagcgcacgcgactggtgcgtgcctggacccacctagagcgtcagcgtggtggtcttggctttgtcggcggccccggcgaaacccagatcgaagcggaccgccgcgccatcgacgaacagcttgtccgactgcggcgacaactcgacaaggttgtgaaaacgcgtacgctgcatcgcgccgcgcgcgccaaagtgccttatccgattgttgcgcttgtgggatataccaacgctggaaaatccactctgttcaatcgtctgaccggggcagaggtgatggcgaaagacatgctctttgccacgctggaccccaccatgcgccgcgttgagctgccggatgggccagaagtcatcctctcggacaccgtgggattcatctctgatcttccgaccgaactggttgcctcgtttcgcgcgacgctcgaagaggtgctggccgcagatgtgatcctacatgtgcgcgacatcagccacagcgacaccgaacatcaggccgaagacgtggagcagatcctgagctcgcttggagtggacgaggaccgcacggtcatcgaggtctggaacaagatcgaccagctctccgaggaagaggcggatgcctgccgccaacgggcagaccgcaacgactcgctctacgcgatttccgcgataaccggcgaggggctgcctcaactgttgcacgacattgccatgaagcttcagggcgtgcgtgtggatgaggtactgacgctggacttttcccaaggaaaacagcgcgcctggctcttcaaacaagacgttgtgcaagaggaaaaccagaccgacaccgggtttgagatttccgtgcgctggaccgaaaagcaaaaagcacaatacgcagcgctctagagcgctgcgtttttctttagttgcgcggcaggatacgggtgacgccgacggaagcggcgcgcgccagtttttcgtcgagagacatcgggatatactccccacgccgccagtactgtgccatgtcatcgtagtagcgcgacaggaaatgcccggactggcctgttgctataatgaaaacagagctttcgggatcggcgaaatcatagacaccgcgatagcccgccccatgcacattgttgaagggcgccggctcctcgcccgaggtgaggccgcgctgcagcgtattgtctccaccactggtggattgacggatgttgacgaaatagcgcaggaacggcacctcgcccaagacctcgtgatcctgggtggcctgatgcgcatccccccagcgcaggctttccaatgtactgccgtagttttcgctgatgtagacgagcgcgtcgtccagcgcgaggcgcgccatgtcggtgcagctctcggtcggggcgctctgggcgacatcacaccaggctgcagcgccatcgatattgcggaacacccgttccaggaacagcggctcaacccggtcaaacgcatccgcaagggggcctaggtcgtcctcgatcagacgtttttgcaaagcacgcacccaacttgcgtagatcagaggctcgggcaaatgctcgttcatctcgccgttccactccgccaagagcgacaatgcgatctggcgctggcgttccggcgtgccattgggcgcagcttcaccggtgaaccacagatccgccccgataagaggcaggagggtttgcgcgctataggaaaccgtatcgagctgcgcttcgatgaaactgtcgcgggtatgcacctcgcggctctgcatcagacggcgccagcgattgatccgctgtgtgtcgccccaggaataactgacgtggttgggaaaggggcgctctagcaacttgttgtttgtatttcccaaaatcccaccgctgggcgcaatgaactccgggttcgccgcatagggcaagcgcccttgccagcggttttcgcgccgccagccctggttgggcaggcgtccccggctttggttgcgcaggtcgcggtcgggcatgacgcccacggtcttgagcgcgatggtgtcatgatccgccagcgtgatattttgggaaggcgcgatgaagttctcgcctgcggcaatggcctgcgcgacattttctgcccgcatcagatcgagcgccgcagtcatcgaggtgtcctcgcgcgacaatgccgtccaccctaggctcacaacgtggccgggcggcgtaatggtgctgagctcaaacagcgagccgggcagaaccggcccgttttcggtccagcgcagggtcagcgtcagcggcgcattgccctttatctgcacgatcgaaggccgcgatgtgaagtccttgtagccatttggggtcagatactgctgcgggttgtccgggttgatcttctcgataaagaggtcctgatcatccagataggaagaggtgagcccccatcccaactgctgagaacgcccggtgagcacagccgggatgcccgggattgtgccaccaatcacaccgccggtgccaagctcaagacgtgccagataccaggttccgggcgctgtcagcttcagatgcgggtcattggcaagaagcgtgccacccgccgccgaacgattgggcgccgcagcccaggcattcgaagccccaccaagcccacgtggcgccaggggcatcaacgcagcatgcgccgtttgcgcccggcgctgttcctcgagaccacgaaatcccgggaggccgggaaacagctccgtatattccggaagcgtcgccgtcccagagccgggagcatcgggcaggatatcctcaaggcgtttgggatcatcgagggcaatggaagtctgcgcgcgcaggatctcttcttgcatattggatgagagctgcacggccatcagtttcataatggcgatgctgtcggcgggctgccacggcgctatgggcatgttgaacaggaacatttccggtgccccacgccccagcgcgtcttcgttgatctcttgcaggcgcgcattcacgcccgcagcataggcctgcagcgcccggagcgtttcggggctctgggcggaaaccgaacttcgcgccgccccataaagatcaagccgccgcaaaaaactgtctgtgcggacggtacgggggccaaagacctcggaaagccgaccctgcgccgtgcgtcgcatcacggccatctgccacagtcgatcctgcgcatgagcatacccgagcccaaaaaacacgtcctcatccgaggcaccaaagctgccaaagatatgcggcacattcgcgttgtcgcgcacgatctcgaccggagccgtagggccgggcagggcgatctccttgtcatagtctggcaaggactgcgccgcgaggaaatagaccaggatcgcccccagaataccaagcagaatcgtaccagccgtgaggcggaggagccagcggaagaggcgtgccattcttttctattcccttggtatttctgtgtttgttgccaagccgcattgcgctttgggcgggtgctgctagggttggcgccaacatatgcgaagacagaacagggggaaaggacatggcaaaaattgcgttccttgggctcggggtcatggggtatccgatggccgggcatctgcaaaaggccgggcatgaggtcacggtttacaaccgcacaactgcaaaggccgaaggctgggcggcagcgacgggcggtcggtctgcgccaacgcccagagaggccgcacaaaacgcggattttgtcatggcctgtgtgggcaatgacgatgatttgcgctctgtttgcctaggtgaggacggtgcctttgccggaatgaaaccgggtgcgatctttgtcgatcacaccacggtatcagcagaggtcacggcagagctctacgcccgcgccaaagacgcgcagcttgggtttgtcgacgctccgatctcgggcggtcaggcgggggccgagaatggggttctttcggtgatgtgcggcggggatgctgcggattacgacaaagctgcgccagtgatggaagcctatgcacggatctgccggcgcatcggtgaaagtggcgcaggccagatgaccaaaatgtgcaaccagatcgccattgccggccttgtgcaaggtttgagcgaagcgcttcattttgcggagaaagccgggctcgacgggcgcgcggtggtcgaggtgatcagtcagggggcagcgggcagctggcagatggcaaatcgctatgagaccatgctcgacgatgagttcgagcacgggtttgccgtggactggatgcgcaaggatctcggaatctgccttgataccgccgacgacattggcgcaagcctgcctgtcacggccttggtcgatcagttctacaaggacgttcaaaaactgggcggcgggcgttgggacacctcatccctgatcaaacggctgcgggccttgggctgaaaaaaagcctcccctcgaatgaggggaggtcttcatcaccttgatataaaacaaaatcagggaatgatacgtgtgtatttggagccctcgatggtggctccgatccgaatcccggcctgaccaaagactgcagcaaccacaggcgccgtcagcgtatttgtatccgccgtcagtgcgtcgccttcgtcgatgaccacatactcaagatctgcaccggccgtccaacccgacgagcggcggaaccgcgccagcgcggcgtcggtcataaagaacaagacatgggaatattgctgcgcgcccagctgcagaccggcgttgcccttgagggcggcataatagtcaaccgtggcgccattgatccgcagcgcgccgcgcccataggcgccaccaaagataaagcccgcctcggtgacgaggggcatcaccagcataccggcagatttctgtgccagatcgcgggtgccgggatagcggtcatacatctgattgagggtggcattgacgcgggcgtcgattttcacgtcattggtgttgccgatcccgttgctgcatgctgcggtggccccaatggccgcgagtccgctggcggtaaacgcacgacgggaaagacgggatttggatgtgctcatgttctgttacctgctcgtgaatctgcgctttggcgctttgtttgacacaactatatgcataatccctaaagctgtcactttgaagcctgcccgattgagcaggttcctgccggggtcttgcaaagaggtttagccgttcaacagtttcgcgacctgtggcgcaaaataggtaagcacaccatcacatccagcccgacggaaggccatgaggctttctagcataactttttccccatcgatccaaccattcagagccgccgcttggatcatcgcgtattctcctgacacctggtaggcaaaggtcgggacctggaaggtctctttcacgcggtggcagatgtcgagatagggcaatccgggtttcaccatcaccatatccgccccctcgcgcagatcgcgttcaatcatgcgaagggcttcattggtgttggcggggtccatctgataggtcttcttgtcgccggtcagggcccccgaggcgccgaccgcatcacgaaacggtccataaaatccagacgcgtattttgcagagtaggacaggatcgtaacattctgaaatcccttcctttccaatgcagaccgcatggctccgatgcgcccgtccatcatgtcagaggggccgatgatatccgccccggcctcggcctgtgcgagggtcatcttgaccagcgcctcgacggtttcgtcgttgcgaatttcgccatcaatcacaaagccgtcgtggccgttgatattatagggatctagcgcgacatcggtcatcacggcgagatcgggcgccgcggccttgatcccacggatggcccgattgcagaggttctccgggttccaagcctcggcacaatcctctgttttcaaagacggatccgtgtagggaaagaggcagatcgccggaattccgagtgcctgcgcttcgacggcggcctcaaccaccttgtcgacagagcgccgcaccacgcctggcatcgagggaaccggctcctcgatcccctccccatcgcgtacaaaaaccggccagatcaggtcattcaccgagagttcgttctcccgcgtgaggtcgcgcaaagcggcagaggcacgcaggcgacgggggcgggaggcaggaaaggaagcgctgatatggggcatctcggtctcgtattctgttccggtgcacatgggttgcatggaacagtggtgcttcacaagtctccgatccgcgcatttctgacgcagcagcacttgtgtcgcagagcgtggcgatggatacagggcaggcagcgcgcagggcgtcttttgtttactctcttggggaacccaaacaccttggatctctttagtctcatcttcgagttgatcgacctcaggtcgttttcgaacctttggtactggatcgcgctggcggtgctgtggtcctcggcgagccactgggttcttggcgtaccctttgacatggtcgcgcgcgcggcaaaacacggtggatcagcggcccaagatctccaggatgcggtgcgcattcaggtgaacaggcttctttatatctctgaagtttcggggtttgccctcactgcttttgcgttttttatgatcaccaccttggtgcttttggggttttactaccgcgtcgaatttgcacaggccgtggtgctgatgctgataccgatgtatgtcgtcggcctaattaacctgcgcgccgctcgggccctgcgcacgccgcatgatattgatgcgctgcgcaaacggctcacacgggcgcgggttctgatacagttggtcggcgttatctcgatatttgtcaccgccctttggggaatgtatcagaacctcacttttggcgcgctcggctaaagagccaacaggatctactaaggaacgcttatgtcacagcaatccgtcgtaatggggggcgcacccgaggggtatgacgcgcgcctggttctgaaagaaatggcgcgaagcgccggcccggtgctgcatatcgcccgcgatgacaagcggcttgaagccatgcgcgcggctttgcggttctttgccccagagattccggtggtgatcttccccggctgggattgtctgccttatgaccgtgtctcgcccaatgctgatatttccgctgcgcgcatggcgacccttgcggcgctggtgcacgggttgccggaccagttcatcctgctcaccacgctgaatgccgccatgcaacgcgtccctgcgcgcgaggttttgaaagaagccgcattctccgcgcgggtgaactccagaattgatgaagatgcgttgcgtaagttcctggtgcgtatggggttctcccaaagcccaacggtgatggaacccggcgactacgccattcgcggcggcatcatcgacatctttccgcccggcgaaagcgggccggttcggcttgatctctttggcgacacgcttgatggcgcgcgccggtttgatcccgccacccagcgcaccaccgaaaagctcgaggtggtcgagcttgcgccggtttccgaggtgatccttgatgaggccgcgatcacccggtttcgacagaattaccgcatagagttcggcgcggccggcagtgatgatccgctttatgaggccgtaagtgcagggcgcaaacatcaaggcatggagcattggttgccgttttttcatgagcggcttgagaccctgtttgactatatgcccgatgcatcggtcacgctggacgatcagctgaccccggcgcgtttggcgcgatgggacagcatcgtcgatcaatatgagacccgcaaaatcgcgatggacaccaaggggcgcatggactcggtctataaaccgaccccgccacggcttctctatctcgatgacaccacctgggagacgcagattgacgcccatcgcgcggttcaattccatccgttccctcaggcctccggccctggtgtggtcgatgcgggcggtcgcatcggacgcaatttttcgcccgagcgccagcaggaaaacataagtctttttggtgcgttagccgaccatatcaaagcgcggatgaccaaggggccagtggttgttgcctcctattccgagggtgcgcgtgaacgcctgagcggcctcatcgaggatgagggcctcgccgagacgatcgctgtctcggacggacggcggatcggaaagtctggcctccacctcgcggtctgggcgctggaacacggttttgaagcaccggatatgacggtgatctccgaacaggacgtgcttggggatcggctgatccgcaagcccaagcggcgccgcaaggcggagaatttcctcaccgaggcgcaatccctctctccgggggatcttgtggtgcatgtcgatcacggcattggccgctatatcggacttgaggtcgtgactgccgcgggcgctgcacatgaatgtttgttgctggaatatgccgaagagtcaaagctctatcttccggttgaaaacatcgaactgctgtccaaatacggccatgacgaaggcctcttggataagctcggaggcggtgcctggcaggccaagaaagcccgcctcaaggagcgcatccgcgagatggcggatcgcttgatccgcattgccgctgagcgcgccttgcgcaaagcgcctgcgatggatccgccgccgcatgcctgggaagagttctccgcccgtttcccctatcaggaaaccgacgatcagctgcgcgccatcgaagatgtaattagcgacctcaactcgggtcagccgatggatcgtctgatctgcggcgatgttggctttggcaagaccgaagtggccatgcgcgccgcattcgtggcggcaatgtccggccttcaggtcgcgattgttgcgccgaccacattgctcgcccgtcagcacgctgcggctttcaaagagaggttccgtggatttcctctcgaagtcagacagttgtcgcgctttgtgacttcaaaagaggctagccagacacgcgaaggcatggccaagggcacggtcgacatcgttgtggggacccatgcgctattggccaagaatatccgctttcagaaccttgggctgttgatcatcgacgaggagcagcattttggtgtggcccacaaagagcgcctaaaacagctgcgatccgacatccatgtgctgacgctcaccgcaaccccgatcccgcggacacttcaactcagcctgacaggggttcgggatctctcgattattggcacgccaccagtggatcgtctcgcgatccgtacctatgtgaccgagtttgacgcgatcaccattcgcgaagcactgctacgcgagcactaccggggcgggcagagcttttatgtggtgccgcggatttccgatctgcccgagatcgaagccttccttcaggagcaactgccggagctgtcctatgtggtggcgaatgggcagatggccgccggtgaactcgatgaccggatgaacgccttttatgacggcaagtacgatattcttctggcgaccacgattgttgagtccgggctggatattcccaccgctaacacaatggttgtgcatcgcgccgatatgtttggactggcgcagctctatcagatccgtggacgtgtggggcgctccaaaacccgcgcctatgcctatctgaccacaaagccacgacaaagactcaccgatagcgcagaaaagcggctacgtgtgttgggttcgctcgacactctgggggcaggttttactcttgcatctcaggaccttgacatccgcggtgcagggaaccttcttggcgaggaacagtccggtcagatgcgagatgtgggctatgagctctatcaatcgatgctggaagaggcgattgccaagatcaaatccggtgaggtcgaggggctggttgaaggcgacgatcaatgggcgccgcagatcaatcttggcgtgccggttctgatcccagaagcctatgtgccggatctcgacgtgcgtctgggcctatatcgccgcttgtcctcgctcacaaccaaagttgaacttgagggctttgccgccgagctgatcgaccgatttgggaaattaccaaaagaagtcaacacgttgatgttggtggttcggatcaaggccatgtgcaagaaggccgggattgccaagctcgatggtggccccaagggcgcgaccatccagtttcacaacgacaagtttgcctcgccccaaggtctggttgagttcattcaatcccaaaatgggttggcgaaggtcaaggacaacaagatcgtcgtgcgtcgtgactggcgcaaggacagcgacaagatcaaaggggcctttgccatcgcgcgtgaccttgctgaaaagatcatcgcggagcgcaagaagaaccgctagggcgatggccgctccatcaactgatctacataaggttttgatttaaaacagtccctctgcctgacagagggactgttcttttatgcgggagttgctgccgcctcaacgcgccccatccagagcattacgatgaacgccagcccagcggttgcaagaacaccgccaaccatcgggatgatcgtgccgtcaaacagaaggccaatcggcgcggcaatcactgccgccgccacggtggaaagggcgcccatgacggacgctgccatgccagcgatatgccccattggctccatggcgatggcattcaaatttccgagggtgagccctaccatgaagaatacgctcgtctgccagaagacaaaaatgtaaaagctcgtcggctcgccaagtgagagctgggtcagggcgaagacacctgtgctgatgaggatctgaactcccagggcccaggtcaccatgcgccgcataccaatgcgccccaccaaagaggcattcaacaagctggcggtaccggccatcagagcgaccatcatgaaccagaagggaaagctctcgctgcgtgcgaacacgacatcataaacgggctgtaccattatgataacagtgaacaacatcgacatgcaaaaggtctgcgccatgatcgagagacgtacggttggatggctgaccatctcgcgaagcgcgcccatgagctgcggcaaccggaaaggccgacgcttgtcccggggcaagggctcctcaagacggatgctcatccagagcacggtgatcagcgaaaacaccgcaaaggcgacaaagattccgcgccagctggagacagcaatgatgccgcttccgagcaggggcgcaaaggcgggcaccagcgtaaaaatcatcatcgcgagcgatatgatgcgcgccatgtcgcgcccgacataaaggtcgcgcacaatcgcgatcgcgaccacccgtgggccagcagccccaagccccatcagcagccgcgagatcaaaatcgtctccagagactggctgaaaaacgaagccagagcgccaaggcaatagagaccgctgccaacaaagatcaccggcttgcgcccgaaggcatctgacagggggccggtaaaaaaggtgccaacccccatgccaagaacaaaggaagaaataataagttgagcctgatttatatcgtcagggcttagacttgcgccgatttccggaagtgcgggcagcatcgcgtcgatcgagaacgcgatggttgcaaacatcatcgcgatcagagcaatgaattcgccctgtggcagggcttttttgcgtttttcaatcatgtgtaacctctcgcggtgacatgaacataggcgcactctgcgaaaggttcggccaccagcccaacggcgctaacacgatatgaatgtggcgggaagtgcttcaagtgttaaatgagcgcacagatccctgtgcgctctggagcgatgtccggcggcctgggcgagccagatccgcaaaacacgcgcgttattaatgcactgcatcaccttcttcaggcgagtctgatgcggcggccgattgttcaagttgagcgcgaatatccgctatgacctgcgcccagagctcgggctgttgcgcacccggcaccacatgttgattggcaatcacaaatgtcgggaccgaattgacacccatcttgcgcgaatgcgcgtcgcgtgcgcggatgtcctctgcatcgctatcaccactcagaagacgctcaactacggcgcgctccatgcctgcttgttcggccagatcggcgagcaccacgggatcgccaatatccttgccctcgacgaaataggctttgaacagagcgtcgacgacgtcggattgtttggcttccaatccggcccaatggatcagacgatgcgcgttgatcgtgttcggggtgcgctgcatggcttcgaagttgatctcgacacccgcggcctgcgcatgctccgcgatctgagcatagacctttaccgcgttgtctttgccaccaaatttcgtttccagataggtgcggcggtccatgccatcgcctggcatatcaggattgagctggaacgggtgccactcgatcacaaaaggatgatccggcgcctctgccagagcgcggtccagatgggtcttgccgatatagcaccaggggcagatcggatccgacagaatatcgagtttcacttgcgcaagcggttcagtcatgggtcagtccttaaacagatcgggcagggcgcggcgcaagagttttccattcgggttggttggaaactccgccaggcgcttgtaagtctttgggcgtttgtacgcggccagacgctcttgtgcaaaagcctgtagcgccatttcggtcacatcctcgcgacccttgaaaacgcccacgatgatgtggacgccgggtttcacctccacctcagccgccgcaaattgagacagaccgggatgggtcgcaaacactgtttcgatctcgagcggggagacgcgaaagccccctgcattcatcatatcgtcgttgcgcccgcaatagatgatctggccatccgcccgcatgatgccacgatccccggtcaaaaaccactcaccgtcaaagcgcgcgcgagtctcctcgggggcattgaggtagccgagcatcaaaccgggatcagatcggtgaaccgcgatgatcccttcttcgccgattggagcagggccatcctcgccgatgatcgcaattctgcggccgcgttgtggcgcgcccatgctctgtgcgacagaagggcgatgcggggccgaggagataaaggtggagcattcagacatgccaaaggcctcaaagatcggggtgccaattcgatctttccagccgtcgcggatatcgccactcagagcctcacccgctgcaagcccatgtctgaggtcaggcagaacgggcagggtgtcgcacttcagaatctttctataaacacctggtacggcggcaaagatcgtcgcctgagtgcgcgtcaatacccgcggcaggtccaaaagatccgtgtcggcagatggaatgatggcggttgcaccgacggacagcggatccatgatcccggtgccaagggtaaaggtccagttgaaggctcctgcatgcagcaggcgatcatttcggctcaggtcataccagtcgcggatcatcatctgccgggcccagatagcccgatgggcatgttgcaccgcgcgcggagatccgccagtgccagaggtatagacgatataggcgagccgatccggatcaccgagcacggcgtcggctggtgggcaggactgcatggcgcgcagcctatcaagagagaccgcgcgcgagtgcggatgggtggcgatgtcaggcgcgctgacgatccctgcgggggatagatcctccaccatccgcgcgacctcgcgtttggtcagctgcgaagatgtcggcactggcacaataccgaccaggatcgcggcgagaaacgtaatcgggaattcgacggtatttcccaatcgcatcaagaggatatcgccgggctcaaatccggattcgagaaagccccgtgcggttccccgcaccgcgcgttcaaaggcagcataggtccagatctgatcctgctccggtcctgcaatcaccagggcggggtgaccggcacggttcgcggcgtggcgcaagacatgcgccgcaagattgaaagctggggggcaggcaggcggtgcgccggtgtcaaaaatggaaagcatggtgaaatgcctatcctgaggtgcgcattcgagcaagtcggcgttgcaaggccctgcgtgcagacttatagggttgctatgcaggaacgcgacccgaagaaactcatctctatcgcgcacgccaatggcgatcaaagcgcgcccgaagcattagatctgggcgcgcgtgtgcgcgagctgcgcaagcagcgggactggacactcgaacatgccgccagccaggccggacttgcgcgatccactttgtccaagatcgaaaacggccagatgtcgccgacctatgacgcgctcaagaagctggcggtcggcctgcagatttccgtgccgcagctgtttacgccgccgcagcgcgatcaggtcaatggccgcatgatcgtgaccaaattcggcgagggctctgcgcatgccacggcaacctacgagcatgaactgctggcagatgggctgacacgcaagaacatgctgccctatcgcgcccgtgtgcgcgcgcgctccatggatgaatttgatggctgggtgcgccatgacggcgaggaatttatgtatgtcctgacgggggtcgtcaaactctatacagagttttacgaacccgtggagatgcgccgaggcgacagcgcctattatgacggcgccatggggcacaatgtgatctcggtcagttccgaagacgcgactattctctgggtgacatcgctcaatcagatgtgagctggcaatcctagcggaagtctttcacggacctgcctgctggcggggccggtagaggtcaacgcgtcaggctgagctccgctctgaggctttccagataaagaaaatcccgcatctcttcgcgggcttctgtcatcgatattccttgagaggtggcgagcgcacggacgagatcctcaccacgcgccttggcagtgaatttggaatcgaccacaaagcccgggaaccgctgtcgcaggcgtggcaaactctgagcaagatcgacttcagtgcagttcaacatcggatcactcgcgtctgagacagatttcgaactctgtgccgcaaatctagcaagaaacaacaacaatgtcataagaatttagtggatttgaaacattaggctcatcttggccgagccagtgctgcctgtgtcctcgctcaaaggcgccgtttcagtgagaaaacagcgcatgattttccactcaatcccctcgccagatgcgaaaaaaaaccggcccagagggccggttagaggtttattcggaggcgttccaccagacctcgggcatgtaatagatcccgtcgccatagatcgggatgcgcatcgggtagcgcaggcttgcctcatgcgcgatgcggctttttgcgtactgccagatgggaatcacatagcgtcctgcggtcaatacccggtccagagcacgggctgcggcaatgaactcttccgaggatttggtcgtcagcatatgctggatcatcgcctcggcagcggggcttttcatgcccatcaggttacgagagccgggcgtgtccgcccctgcgctgccccaatagagcatctgttcgttgccggggctgagcgaaagcgcgcggcgaaagaaggtcagatcaaattcataggcgtcctggcgctcgacatattgtgcgctgtcaacgaggtctgtggtcaggctgatccccagacgttccagtgcggtggcatagatgtcgacggctttttgcatctcagcttcgccgaggttgccattctggagcagaaccttgagcgccatcgtggcgcccttcgcgtcgcgcagtatcccgtcgtctccgacggtccagccggcatcctgcaacagggcgcgggcacggcgcagattggcgcggttgcgctcgctgccatcagaaaccggaagcgcatagccttcgagcgtgccgggaagaagcgcatccttaaagggctccagcagctctgccacacgacctgttgcctctcccggctgcatcgacaggtaagagttcgagaaataagaggtgatgcgcggcagtcgcccgccggtcagcgtgtcattgatgaactcgtagttgaacgcctcgataagagcctgccgcacccgccagtcatccaatggtgcgcgccttgtattcatcacaagccccgtcatgcccgagggtttctgattgggaatttccgtcttgatgacatccccattttgcacgcgtgcaaaaccgtaatcgctatcccacttcgcagcgttgaattcacgcaccgccgagagttcccctgccttgaaggcttcaaagaggaccgtttggtcgccaaagaactcgagtcgcatttcgtcgaaattattggtgccccggcgcagtggcagatccttgccccaatagtcagcgttgcgggtgaaagtcacagagcgaccaagttcaaagtcgctcaccacatagggcgccgtgccgatgggggcctcattcggcggagcatctgcaaagtcacgcccatcccactgtgacttcttgaggatgggtcgcagcccagcgatcaacgcgagctcgcgatcctcgacattgaacgtcagccgcaggctccgcgggccggtctgctcaatgctgtcaaccttggcccagaaaccgcgatagcgcaggtttccctcggtgccgagggtctcgtaggaccagatgacatcctcgatcgtgaccggggtgccgtccgaaaacctggcctcttcgcgcagcgtgaattcgacccaggatctgtcctctggcgtttcaatcgattcggccagcaacccatagagcgaaaacggctcgtcataggagcgccccatcaaactctcgtaaccccagaaccgcatttgccagggcgggttgcctttctgggtaaatggattgagggagtcaaaaccgcccagattgccaaatacaaccgcgccgccttttggggcttcggggttcacatagggcagagattcaaaccccggcgaaagctggggatcgccatacatggcgatgccatgggctgattctgcggccgcaaaggacgccccggtgagaaacgtgattccagccacggctgagcggatagaagagaaaaataatggtctcattttgagaacaatcctgcgctgcccttattttcataagtcatgacgctatctgggctacgggaagagttcaaacttttagcttggaccgaggccagaaattgcttataacagtgtcactgctcgataggtttcttgcctgtatgaaacctgcctcaataactgaacgccggcttcgtgccggcgtttttttcttttgtggtgaccgcgcccggtgcagcagccaattcccgcgttgcactcctgtgatgtaaatttccgatccgaagggcgtttattttgcgcctgcagcatgcgaagctgagcgaaaggaaagcaggctagcagaggaatgctcatgtccgtcaaaggtaaaaccgcagtgatcaccgggtccaattccggaatcggtctgggtgtcgcccgggaattggccaaggctggcgccaatgttgtgttgaactctttcaccgatcgcgatgaagaccacgccatcgccgccgagatcggcaaggaatttggagtggaggcgcgttatattcaggcggatatgtccaaagcggagcaatgccgcgcgctgatcgagacggcgggccaatgcgatattcttgtgaacaatgccggcatccagcatgttgccccgattgacagcttccccaccgaaaaatgggacgcgatcattgcgatcaacctcacctctgcgtttcacaccacggcggcggccctgccgatgatgcgcgcggccggttggggcagggtggtaaacatcgcctcggcccatgggctgacggcctctccctataaatcggcctatgtcgcggccaaacacgggattgtgggcatgacaaaaaccgttgcgcttgagaccgccgaagagcctatcacctgcaacgcggtctgtccgggttatgtgctgaccccattggtggaggcgcaaatccctgacaccatggagaaatacaacatggggcgcgaagaggtcatcaagaaggtgatgctcgaacgccagccctcgcgagagtttgccaccgtcgaacaactgggcgggaccgtgaatttcctctgctcggatgcggccaagcaaatcaccggaaccaccatcagcgtcgacggcggctggaccgcactctgaggatgcctgcgcgcggccggggcactgaaccggcagcgcgcatctgtgccgggacctgaatgttcaggaccggaacgcgagggaaacagcaaccatggtcaaaaagatcaatctggccctgcagggcggcggcgcacatggtgccttcacctggggggtgctggatcgcatcctggaagatccggacatcgaggtcgcagccatcacgggaacctctgcgggggcgctcaacggtgcggctttcaaggcgggcatggccaaagaggggcgtgcaggcgccaaggcgtccctggatcggctctgggcacgcatgggggctgtgggcgacatgcggatggccaattggatcgccggctttgacgccgctccaatcctgggcgcgctcaaggtggctgcgcctttttctcccattgaggctatgagccaggcgatctccccctatacctacggtccattttatcgaaaccctttacagccggtcgttgaacaattcgacttcgacaaggtttgcgccgatgcggggcctgatctctttatttgcgccacatccgttcaaaccggcaaagttcgggtgttctccggaacagatgtttcaaccgacgccattttggcctcggcctgcctgcccaatctgtttcaggcgatcgagattgataatcccgagaccgggcatgtcgaatcctattgggacggcggctatactgggaatccggcgctgtttccgctgtttcgcgacgaccttccggacgacctgattgttgtgaacatcaatccgctggtgcgtgaggaagtgccaaagacggctcatgacattcaaaaccggatcaatgagatcagcttcaactcgtccttgctgcgcgaactccgcgcgatctcgtttgtgcaaaggttgatttcgcagggcaatattgaagaaggccagatgaagcgggttctggtgcatatgattgccgatgatgccttgatgacgcgtctttcggtgacaaccaagctcatcccgatcccgcaggtccttcacatgctcaaagaagcggggcgcaacgcagccgatgcgtttctagcagcccatagagacgatctcaatcaacggcaaaccgttgatcttgttgagatgtttggctgatcaggaaagctctttggcggctttttcctcaagcgcctcggctgcgtccttgccattggggtagaccagacccgccgaaatcaccagctttgccgcgtcctcgacggtcatgtcgagctcgaccacgtcctcttcgggaaaatacaaaagaaaaccggaggtcgggttcggagtggtgggcacaaaaacacctacgagacgcccgctcgtttccgtgtgtttgacgatttcacccttggcggtggtcgagatgaacccaatcgcccagatgccgcgacgcggatactggatcaggcaggccttttcaaaactgcgctcggtctgggcaaagaccgtttccgagatctgtttgatcccggaatagattgatcgcactaccggcatccgattgactaggctttcggcatacccaatgagcgaacgcccgatgatgcccttggcgatccagcccaccacaatggtgaagagcaggaagataatcagcccgacaccgcgcaggttgatgccgatatactgctccggctgaaacgtatttggcaccagcggcagaacaacgccatccacccagcccatcacggtccaaaggagccaaatcgtcagaccgactggcgcaatgacgacaatccccgtcagaaaggacgaccgaaggcgggcaaagagcccgggacggcggggcgggggcggggtctcgtcgaatggcgtgttcatggtctgctatctagttggctcgcatgcaaattagggactgtcgccctgcgctacaatggtttcgcatgcgagccggttaagattgtctcagagtttggccaattctttggcaatttcagccgcaaggcgcgcgttgttgcgcacaagtgcgatattggcctccaaagaccgcccttcggtgagctcaaaaatgcgctgcagcaggaagggggtcacatccttgccggtcacaccctgtgcatctgcctcgctttgcgcttgtgcaatgatcggggccaggtcggtggctgcgatttggtcctggacagggatcgggtttgccaccagctgaccgccgggcaactccatcgcgccgcgcaggaaatgcgcgcgagcaatctcggtggctctgtccatgcgcaggggggccttcagatccgaggtcgcggaccagaacgcaggaaagctgtcctgaccataggcgatgaccggaacgccctgtgtttcaagcacttccagcgttttgggcacatcgaggattgccttggcgccggcggccacaaccgtcacaggcgtctgcgccagctccagcagatcggcagaaatatcaaagctcgtctcagcgcccttgtgaacgccgccaatgccgcccgtggcaaagacggaaataccggcgagccgcgccgcgatcatggtcgcagccaccgtggttgccccggtgccgcccgtcgccatgcaggcggcaaaatcagcgcgcgagatttttgcaacgtcttttgcctgaccgagcgactgcagcgtgtcggcctcaagcccgacatgcagtgtaccattgatcacagccatggtcgcgggcacagcgcctgcagcgcggatgtcagcctcgacctgtgcggccacctcgacattctgcgggtaaggcataccgtgggtaatgatggtgctttcaagcgcaacaattggtttgcctgcggcgcgggctgcttcgacttctgcggaataggtaatgtcgatcaaaggggcggttctccggaaacataggttgcggctgcatgaagcgcagaagcgagcgcgctgtcgcggtcttctccccgcgcctcagcagcgatatgggcggccatgaacgtatcgcctgcgccggtgacccgggcgacggtgacgcgtggcggaacttgggtgcggtgaccgctggcatcggcttcggtggcggattggccaccatcggtaaccagaacgcgggcagccccgcgcgccagcagcgcctgtgcagcggtttcactgtcggtaaactggtcctgacacagcaggcctgcctcttcgaggttcacgtaaagcgtgccgcgggcatgggtcagaaacgggcgcagccgttccgccttgccgggcgaggcgggcgcgacgcgcaaatccgagcgcgcaaaggcaggatgggtcgcgatctcatccagaagcgccagcttcaggttcccatcaagcgctaccggtccttcaaacggcgcatcggccgtgcccagcggcccctcgacgagggggcgcaggatcttgtcgcctgctgcctcgagcgaatgggcatcggcaatcgccgcgatcagcccattggcaccctcaaccgccatgtagcgatcggtcggcaaatcctccgagcgatatagatagtccgtcatcagccccagatgcccacaggccgaaaccagctcatccccttcgggatcgcgcccaatggcgctcagcacggcgggtttcattccaaaacgcgccagcgtcatcgcgatgttcatggcaactccgccgggcaggcgggtgatgcgcccgggcatgtcagagccacgctgcatctccatggtgcttctgccgataatgtcccaaaggacggaaccgacacagagaatatcaggtttggagaaatcagcgctttcagtcatagggatctcatgacgcctttcgttggcccccgcaagcccatttacggtgccggaagcctcttgtcgcaacaggaatgactgtgcacggccgggcgatgccgcgcaatcattggtaaggttgaaatggtctgtgcggtggttagcccatcgcggcctgaagcgacttcagcgctgcgaccggatcctcctcgcgccagatttcttcgccgacggcaaagaaatccgtaaagggcgcgatcttgcgcaccacatcgtcggtgagaccgccttcggccacgaccgggacttcgatcatctcggaccaccactggaacagatccgcctctgccatcgccccatcgccaagcccggaggccccgaccggaccaaaacagacgtaatccgcacccgcttcgccggcggtgaggccttcatgacgcgaggcgccgcagaaacagccgacaatggcttctgtgcccagagccttgcgggcgctgcggatggatttcgacgaatccgtcagatgcaccccgtcgagccccagccgttcagcgaggatctgatgatccgagatcaccagcgcgatgtcgcgggcatgggtgacttcgcgtagggcgtcggccgcgcggctcagggtgtcctcatcgcggctcaccagatcgagccggacacaggcgacttcaatctcgtccagaacgcgggccaactggccgggaaactgccccagctcaaagctcggcggcgtgaccaggtaaatctgcggctgctccggtgtctgctctgcgctgtccattgtcagggctcctgttggcgtgattggcgggtatttacccgaattcacgcgcaacgcaaggatttgggcacggatcgcgtgggttttcccaccccgaagccttgccccaacccggcgcagacagtaaggcagagccgatttttgcggagttccaagatgccctcagaccgtcctcaacctgactttgtgctcgtgcgccctcagatgggtgaaaacatcggtggggccgcgcgggccatgtggaactttggcctcgaccgcatgcgtatcgttgcgccgcgcgatggctggccaaatcccaaggccgtggccatggcctccggagcggggcgcctcctcgacgaagcgcaactggcacaggacctgcccgaagcgctggcggattgcacctatgtctttgccaccacggcgcgcccgcgcgagctgaccaaaccggtgttcagccccgaaggggcaatgaagaaggccgcagaactgatggtgcagggcgagaaggttgccgttctctttggtccggaacgcgccggattggaaaacgatgacattgccaaggcaaacgccatcatcaccgtgccggtgaacccggagtttgcctcgctcaaccttgcgcaatgtgtcttgctgaccgcctatgaatggcgccgccagcaagagcaggtcgcgcatgagacctttgaaatcgggaaatccgaatgggcaaccaatcaagaggtggaagcccttgtgaaccactatgaggagcgcctgacggaagcgggctatttcttcccgcccgaaaaggcccccggcatgaagacagtgttccgcaacctctggagccggatgcaactgacgcgcgctgatgtgcaaatgctacatggggtgatgcgacagatggtccgttggaagcagcgcgaagaggactaactctcgctggacctttccaccctcagaccctagcgtcctgcaagattaagatgtgaggccaagatgagcaatcgcacgatttttgaggaagtctcctccgacagcaaacaacagtcctcgccaacgccgggcgggattgatcgcaagcgccggggcgcgcgcggtgcgatccgtgtctggcttgcggtgctgtttgcactggtggtggccatgattgcagtcggcggcctgacgcgtctcaccgactctggtctttcgatcacggaatggcgtcccgtgaccggcgcggtgccgccgatgagcgaagccgaatggcaggccgaattcgagaaatacaagcagatcgaccagtaccatctgatgaacacatggatggaactctctgactttaaaactatttactggtgggaatggggccatcgccagcttggtcgtgtgatcggattgatctgggccttgggctttttcggctttcttgtcacccgaagcatcccaactggctggaccgggcgtctgcttcttccgggtattctcggcggtgttcagggcgctatcggttggtggatggttgcctccggtgtgacgcttggtgaggggatgacgtcggttgcctcataccggctggcgacacaccttggcctggcctttgtgatcctcggtttcctggcctggtacatgtttctcctcgggcgcgaagaacgcgacctgatgcaggcgcggcgcctgaaggaagaaaagctctttggcatgagcaccggccttttgcactttgccttcctgcagatcctgctgggtgcgctggtggctggcattgatgcagggcgatcctacaccgattggccgcttatgggggggcagatctttccaccgcgccccttcatgattgagcctctgtggaaaaacttctttgaaaatcctgggcttgtacagttcattcaccgggttgccggctatcttctttttgcctttgccgttgtggtctggctgcggggacgccggagcgcacacaaggcgacgcaatttgccttcaacgccgtgttcgcagcactgagcctccaactcgtgatcggcatcgtcacagtcatgaccgcagccccggtcgagatcgcaatcgttcaccaagccgtcgccgtgctggtttgggtgctgatcttgcgcgcgcgcttcctctctgcctatcctgtcgcaacttccatcaaaggacattgaagacatgagctcttttgaagaactgattgcttttgaacgccaaacgcaggctctgggtcaaatcgcaggtcggttgggctgggatcaggagaccatgatgcctcgcggcgcggccccccagcgcggtgaggagatggcggcaatcgaagccgtgctgcacgcgcgtcgctctgatcctcgggtcgcagagtggctcgacactgcgcaggccccggatgagaccggcgcggcacaattgcgcgaaattcgccgcgcctacgagcgggcggtcaaggtccccggtgatctggccagtcagatcgcgcgagtcacatccgaggcacaaggcaagtgggcgcaggcccgcgccgatgaagatgtcgcggcattcctgccggtcctcagcgaagtagtcgcactgaagcggcaggaaggtcaggcattggcggcgggtggaaacctctacgacgcaatggttgcagattacgagcagggcacaacctcttcggaaattgcggaaatttttgatgcgatgcgtccgggcctggtcgatctacgtgcgcgcgtgctggaaaaaccgaccccggcggggctgtctggcacctttgacgagaacacccagatgaagctcgcgcgcaaggtcgccaagacctttggctatgatatgagccacggtcgcgtcgacaaagcggtccatcctttcagttcgggtagcggtctggatgtgcgcattacaacgcgaaccaacccgctagatccgttcaactgcatctactcaaccattcacgaagtcggccacggcgcctatgagcagaatatagaccgggttcatctgctgacttcgcttggccgcggcgtctccatgggggtgcatgaaagccagagccggatctatgaaaatcagatcggtcgcagccgcgccttcaccggatggctcttcaaggaaatgaccgaagcctttggggatgttggcgtttcttctccggaggagttctacaaagcggtaaaccgcgtggagaatggctacatccggacagaggcggatgagctgcagtacaacctgcacatcatgctccgattcgacctggaacgcgccttgatgctgggcgatctggaggttcaggacctcgagagcgcctggaatgatcgcttccttgccgattttggctatgcggtggacaagccctcaaacggatgcctccaggacgttcactggtccgttgggctctttgggtatttcccgacttactcgcttggcaacgtctacgctggctgcctacatgaggcgctgcgccgcgacatcgcggatctggatgcacaactgtctgaaggaaacacctctggtgcgaccgaatggttgcgggaaaacctgcagcaattcggcgggctgcgagagccgcaagagaccattgcccatgctgcaggctctgcgccgacccacgccccattgatgcactacctcgaagcaaaattctcagagatctatgatctttgacacaggtgacgtcggagaaagatcaaagcccgggcaatatgtcccgggctttttttagatcaacgccatccgctccgcgcgttcgggatcggggaaaggtcgatagaggccaaaatcggatctcgcgataagaacgttgacgtttgcatagaggcgcgcgacctcctcgtcgtgttcacccagaattcgaaacgcctgatcgagctgagtcatattctcaaactcgatctccagcaggaaatccttgcaggtatcgtttgcaaggttcagcttgcgccgaagtaggcgccaaccggtgatcgcgccgcgacttttcagatattccatccattgctccactgcgctggcaaaggccaaagccttagcttcgtgttggaggtcaatctgacaatggtagagattcatgcgccgcttctcccgactcaatacgcggaaatcacggtcaagtttgcgcccaaaacatgagcgaagcgtaaacgaaaaacgccgccccaaatctggagcggcgtattcgcgagattttagcggtaagagattattcttccacggtttcttcgtcgtcaccgttgtccgcaatccaagcgaccgagacgacctcttcacccttaccggtgttgaagatccgcacgccgcccgcagaacgagaccggaaggaaatgccatcaaccggcacgcggatcgactgccccttggatgttgccagcatgatctggtcatccagttctaccgggaaggaggccaccaatgccccgccgcgcatggctttgtccatcgcggtgacgcccattccgccacgcccgcgcacaggataatcgtgactggacgagagcttaccggacccgcctgcagtaatggtcaggatcaggttttccgccgcagacatctctgcaaagagctcggtagagaaattcggatcctcaaccgcatcctcgtcagaggcatcctcatccgtcagacccgccatggcgcgacgcatcttgagataggcggagcgctgctcgggcgtgtatttcgagtgacggatcaccgacatggagacaacctcgtcgtcctcgccaagcttgatcccgcgtacaccgaccgagttgcgagagttgaagacgcgcacctcagtggtagggaagcggatcgcgcgaccggtattggtcaccagcatgatgtcgtcatcttccgagcagatgcgcgcattgatcagcttggtgccttggttctcatcctcgaacttcatcgcgatcttgccgttgcgcatcacatttgtgaagtcggacaaccggttacgacgcacagttccagcagaggtcgcgaacatgatctgcagatcatcccattccttttcatcccgatcgactggcatgatcgccgcgatggagacgcccgtggggattggcagaatgttgacgatcgccttgcccttggaggtccgtcccccttgcggcaggcgccaggtcttaagcttgtaaaccatcccgtcggtggtaaagaacagaagctgcgtgtgggtattcgccacaaagagcgtggtcaccacatcctcttctttggtctgcatcccggacagccctttgccgccacgtttctgggcgcggaaatcggcgagcggcgtacgcttgatgtagccaccagaggtcacggtcacgaccatgtcctcgcgctcgatcagatcctcgtcctccatgtcgccggaccagtcgacgatctcggtgcgacgcggcacggcaaagctctcgcggacctcggcaagctcatcggcgatgatgctcatgatacgttcgcgtgacgatagaatctcaaggtattccttgattttacctgccagttcttcaagctcgtcggtgacttccttgacccccagttgggtgaggcgttgcagccggagttcgaggatcgcgcgggcctgtacctcagagaggttataggtcccgtcgtcgttcatcgtgtgggtcggatcatcgatcaggcgaatgtagccggcaatatctgccgcaggccagcgacgagtcatcagcttgtgacgggcctcggccgcatccgcagaggagcggatggtggcgacgacctcatcgacgttggacactgccaccgccaagccacacaggatgtggctgcgctcgcgtgccttgcgcaggttatacgcggtgcgacgtgcgacaacatcctcgcggaagtcgatgaaagatgtaaggaatttgcgcagggtcagctgctcggggcgaccgccgttcagcgccagcatgttgcagccaaaagaggtctgcatcggcgtaaagcgataaagctggttcagaaccacctcgggtgtcgcgtcgcgcttcagttcgacgaccacgcgcacaccgttgcggtcggactcgtcctgcacatgtgccacgccttcgatgcgcttctctcgcacctgttcggcgattttctcgatcatggacgctttgttgacctgatagggaatctcatcaactacaatagcatagcgatctttcctgatctcttcgacgcgggtttttgcgcgaatgatgacgctgccgcgcccctcaagataggctttgcgcgctcccgatcggcccagcatcacgccgccggtcggaaaatccggtcccggcacatattcgatgagctgctcggatgtcagatcgggatcttcgatcagcgcaagcgtcgcatccaccacttcgccaaggttgtgcggcggaatattggtggccatccccaccgcgatacccccggcgccattgaccagcatattcgggaaacgtgctggcagaacagtgggttccttgtccttgccgtcgtagttgtcctgaaaatcaaccgtttctttttcgatatcggcgagcatgaaggccgcaggcttgtccatgcgcacttcggtatagcgcatcgcagccgggttatcgccgtccatggagccaaagttgccctggccgtccagcagcggcagggacatggagaagtcctgcgccatacggacaagggcgtcatagatcgcgctgtcgccatgcgggtggtacttacccatcacgtcgccaacgggacgcgccgacttgcggtaggccttgtcgtggctgtttccggtctcatgcatcgcatagaggatccggcggtggaccggcttcagaccatcccgaagatcggggatggcgcgactgacgatgaccgacatcgcatagtcgagatacgagttgcgcatctcggattcgatggagaccgtcggaccatcgtatgatggacgctgaggtaggttttcgtcagggttttcaggggtttccggcgtatcgctcacgttggctgcccgcttctctttgggatctatatattgtgggactaccttatcagactgcgcatataccgtgcaagcaagcagccctgcaaaccttagcagcatctacggataactgctaacaaactgatttatttgaaaatttacctatcatgaataggctgggtgtatcgaaacttttcggaggacacaaatggcgccatcagagacagaattgatgctcaagggatatgggctcacaacggccgaattgacctacagaatgcccgactacgcccatgtcttgaacaccttcgtctggcaagactatgatctcgccccggaccacccacgattgttttccttcatcgagttctggcaggaagagatagaaggagcccttcatcacgttcgctttgcgcatcgcaagatggtttccgccggggaatggcgaaacgtcgtcggcgaattctacatcaactagatccggttcgatggcttggcctttgcggcaagctgtgacactgttttgaacagacgatttcatcctgcgggatgcgacctcaagtttcaggagcagtgtcatgtatttcaacgaatatccggatagagagatgctctcgatctcggttgccaatcggattgccggggatctgaaaacccagcttttgaacgatgggcacgccgccatcgccgtcgctggcggcaccactccgggcccgatattcgacgacctctgcgctgctgagctcgattgggccaatgtctgcgtgatggcttcggacgagcgttgggttccagaggacagcgatcgctcgaacgcaaagctgatccgcaatcggctcttgaccaaccgtgcgtccgaggcccggttcttgccgttttacaaaacagggcttgagccaaacgacgcgatcgcgccgctctgcgaagaggtgcgcgggcagggtggccttggagttgcgctcttgggcatgggcacggacatgcacacggccagcctctttccgggcgtttccgggctcgaggccgcgctggccgcagacgcgccagagcttgccgtaatgcgtcccgatagccaacccgagccgcgtatcacgctgaccgcacgggtcctggacgccgctatggcaaaacacttggtgatttttggtgcggacaaacgcgaggcgctggaacgcgcgcaaagcctgccgccagaagaagcgccgattcaggctgtcctgtctgaatgtgaggtccattgggctgcctgagccctcgatgatcttgccgcagggaggtgctcagcctgcctgcgtcgccccatcaacgtcgacaaactgctgcgtcaggctctccgggatcggatagccggcgctgccgtccgcggttctaaacaccatcaccccgaccatgctggcgcgaagatcgccggaccatatctgctgttccagcacataagaggtgcgccggaacgacagaacccgagcagtggtgatataggtttccccgagcaccatctcgcgcagatagtgaatatccgcgttgcgcaccacatgacgtggctcttcgccattgaaatgatggcgaaaatggctgttgtagtagttcacccgaagcgcctcgaaccagtcgagataggctttgttgtttacatgctgcaggatgtcgatttcagagaaccgaacccggtccgccattgccatgggcgcgggatttgacaggccatacgcgcgttgttcttcggcggtgagcggggtgagaaatcgaggttccatggcactggcctatttcgaaacccacgcaaacgcaagccgttccagcggcggcagacgaggtacgatagaggtcagggggagtttggagcgggtgaagggaatcgaaccctcgtcgtcagcttgggaagctgctgctctaccattgagctacacccgcgacaggggttcattaccactgaccggctgacctcggcaagcgaattgatcctcagttctggtgatttctcatccgctttcagtaggctagcggtggacacctatgcagtgaggcaaccaccccagattgcagaagattatcgaggcaattcacgtcgcgttctccccaaaagctctttacattccgaagcgaggctgacaaatagcctctcactgcgggtgtggcggaattggtagacgcaccagatttaggttctggcgccgcaaggcgtgggggttcaagtcccttcacccgcaccacattgtttccaaacaaaaaatctagaccctagggaaagccaacttttgcggcgtttgtcgagtttcccatttagtttcccgctttctcgttctgttcatgttctggtccgtcgcgcttgtgcggactttgaaaggcgcttctgattggcttgacttcgatatttcttgaccatctcaagcgtcttgtgaccggtcacagcttggatctcgctatcgctcgcaccggcctctgccaggtggaccgcagcggtgtatcgccatccgtgaattacatagccaacagcaccgattttctcgcgcacggccatgacgcgctgctgaatagtccgcttcgcgactcctttgtgcagtgactgcgcgatgatgaagcgccctctacgcggcaagccgtcgaggtatcgcttcaagaacgtaggacaagctacccacaaacgcgctgctgtcttctcttgaacgacagcgatgaactggccgtcatagtgcgcccactccatacctaccacgtcaccgattctctgaccggttcccacacccagcatgtaggcagtcaattcccattcgagatcatgtttcttgcaaaatgcctcgaaggcttgcagcttggcgtcaggccaaggctcatattcaccccccgtcagcttcttcaccccgcttgctggatttgctgtaatccattcaagatcgatggcgtgacgcgataggatggaaatcatctcgaccattgcatttgctttacgccatgtatcggcatacgcatcgcgagcggcaataacgtcgcgcctgcgcagcttggtgaaatccttggggccgttcttttctctgatcagctcaagcgtgcgtctgtactcttgctgcactctgggctttcgatctctgaactctggcgtctggtagtagctgacaatcagggcctcgaatgtcgttttggccttttttttcgcgcgccctgatcggatggcccaataagcatcatcaaattcttggctgtcagggtcatttggaagacgctgatacgtctctccgcgccgaaaataatagtagacacgacccttgacggtcttggtcgtcacatactttcgctccaacttctttaccatgtgaactcatcttcgctcatagcgttgccgttcaaaactgactcaaggtcggacacccgccagcgctcaaagccagagatacgaactggagaggggagagatccggcctgcaccaatcggcgaaagtctgacggagccatgtccatcatctttgccgctgtgcgttcggcaactgctatctgtgcgattcgtcccatgggggagtccttaaacggtcggtctgctctatttgatgtacgggcactattccgtgcgcagcaccgagagcttcccttcgtttggtgcgaatttcggatccgcgcggtattgctccgcctcttcgatctgatccaagaaagcagcgcgggaagtgcattgggcgccaataccaaccgtcaaagactcaatcgcgtgatcggatttgatttcagtatgagcattcatctttaggcctttcggttggttcgtggattaagccgcggcggcatattgctttgatgcttggtcgccccattgcagagcggcggcttccatcattccggggaaggatcggctgcgcagtcgggtgcgctccgcgctgggcgacatccgatgaatacggttccatttcttccactcatcggatccgcgttccggctccttgagccggttggtctcgaccaagggtgaaaggccgcgcagataccatcctgtcgctttataggtcggctcaccaaaccagaacggttgcacaaggtgcggtgctggcaaatctgcgggcattcgatctttggcgaggtcgttcatcaccgggttttcgatagcgacccgatcaatcggagcgcgccagcaagcagtaaaaatactgacgccttcctcaaagtcgtcgcgcatgtcttgccaggtcttcccctttgggagttgacgggggcgggtccacttgccggggccactcatccagcgacggccggaacgacacaagcgtgtgcaaggcgggtgcatcacggtcaaaagatcccagccctcgtcaagtataccgtcgcgaatgtcgcagcggatatggcggttggagccatcctctgcggcctcaatgtcgcaagaccagacgtcatggccgagggcctcaaaggcgcgccgggcgatgccgctggtttcacaaccgatcagtatctttgccatttggatcacctttggaattttgcccggggcgctttggttcgcgtgagtggtggacgtggccccgggcgctgcggcactatccgcagggtgtgagaaaagggcaggggtgcgatcacccctgccagttggtcagaggcaggtttcaggcctcgacggggatcttggacggcgcgctttcttggccgttgaacgggcaatctgggcgaccgtcggtcgcgcgtttggtcgtgcggctgattgctgcctcgatccaaagcgaaatcgcttggcctctggtaggcgcgtcgacgcggatgccgtgaagatcaaccatccaaagcatttcttcataaacccatgggtcatgatctggacgccagatgttgccgccgagctcacgaaatttgcgcgcgcggttgagtaggggcgtggctttcaggatctgggcagcggaatagggggtcatgctctctctcggtaaatgcgcgggcggcgtgcaatttggaggattgaaccgcccgcgcccgatccgcaccgcaagacgggtgcgaaacctctggaatgcgcggcaaagccaatcctcaaaaccttgccgcgtggtgttcatattggggcgggtggagcccgtgggggctgcccgatatgcgccgcgcttaccgcgaagaacggaggggcattgcggctgcgtcgggcattacgccgcatggcggcggtgcggctggatcccccgttcatccatgatcgcgcggaccttctgcccgacacgatccagagccatatcggtcggctccggtgttggcgctgggcgatcaatcagatgctgagggcgcaagcgcgcagggttgaagccctggccgcgcgcggccttcattgttgcccatgcggatgtaaacaggtggatttcgtcgaggtgctcctcgggcgaaccggcgatttgccgagcggcttgggtaaggtcttgcattcaatcctccatcggttgatgaattgactgtagtggggtaatattaccccgtcaaggtaagtggggtaaaaaaaccccattcgatgcttggagactcatcatggtcgggaggggcgggtcccagccccaagcagacatgatcgatctacacctcgggcggagggccgaccttcgctgcgcttgtcacgaacggcagcagtgcgcagatttcggacacgcactgagcgaagtacgcaaggcagagtcgagggttgcaccaagctcccgcgttattttgcctgatccctgtcaccacaggttgtgcagaaacgtgtgtacgtgaaagtcagttttgctctggagatgcgttttcctaagaggcgctggccatctgagcttgaaactcttctccctttctagttgtcttgcggtggatccttctcggatcagaatttaagcgaggtgtagagcattgccggtttcaatggatgaatttattggccaagtggatcctgaaaaaactgtgcttctgtttggtgcaggcgcatcaatcccgtcgggggctccaggcgttgattcactgatcagtcattactccgaaaagtacagcctggaaaaagatcttgagctgtccgaaatcaccttcttggccgaaaaaaagtcaagccgtcggcaggtcattaatgacttgcgcaaatttttcccacatgtgaagccgaagggtggactcatgaaaatccctcgctggaggtggaagagtatctatactacaaactatgacactctcgtagaacaatcgttcgatagtgccaaaaagaggtgtcgagtatattcttctaactttgacttccatatagatgaggaagaatacgattgcgagctatttaagattcatgggacaattgaaaaagatatttcaaccggccatcatagcagaattatcctgactgtggatgactacgatcatactgaagagtttcgagaacagctttatgatcggatgcgcggcgatctggcaggtgccgatcttgtgataattgggcaatcactgtccgatccagacatggatactctggtgaggcgggctgtaaagatcaatgaaaaagcgctatcccctggtcagatcacacttctgatctactctgaaaaccaaagtcgtgcgctccttcaagaacgcaaagggttgcgtgtagtcttcggcggaattgacgagttcttcacgcgactcgacaaaagaccgccaaagatcgcacccgtcatgatttcgaaagacgacgaggcgctaatcggcacgcatatatcaaactctattgtcgaagtgtcggaagtttccaatggagccgaagccgacgtcagttcgatgttcaacggctggcctgcaactcaccgagaggtcgaagcgggcctaacattcgaacgcgatatctcacgtgaggttgctaaacactttgaagatccttgtaccctttctggggttattctaggggctgccggagtaggcaagtcaaccgctgccagacagacattacaactcctccgccgcgcaggcttcagggcctgggagcatgtgaatgaacatactcttagcgtcgccaactggagaaagattgccggaaacctcaaggaaagtgagctcttaggtgtcctgcttgtagacgaagcacattctcatttgcaccaacttaatgagctgatggacctgcttgtcgcagatgacaatccgcacctgaaaattcttgctgtttcaacaaaaagcaattggatacctcgaagcaaaacaccaaacttcaatcgttgtgggaaggatttttggctttcaaaactgtctgtagatgagatcgaccggctcttgaatttaattgaacgacagccgcgcatccgtgagcttgtcgaggagtcttttagcggattcaacaaaggcgagcgcagaaggcggttggtgcatagatgcgaagcagacatgtttgtttgtctgaagaacatttttgcgtctgagtcgttcgacgatatcatccttcgagaatttgctggcttggacgccatccctcaggacatttataaacacgtcgcagctatggagacactcggagtacgcgtccaccgccaacttgccgttcgcatgcttaacgttgaagcgagcaatatctcaaatattttgacttccttggatgatatcgtcgaagaatatccggttgatcgacgcaaaggaatatatgggtggaagtgcaggcatggtgtcatttcagaaattgtcactagatacaaatttggggatctcgaacagataatatccctccttgatcacgtcatagataacatttctccgtcctacgatattgaggttagaaccctgcgcgagctttgcaatctcgacggcggaatttcacgaattcccgaaaagaaagagcagaatcgtctattgaggcgaatgatatccatggccccaggcgagagggttccgcgacatcggctgatcaggaacctcatcgaccaaggtgagtttgagaaagcggaaacggagattcgcgtcttcaactttgacttcggctcagacggccccgtccatcgctataaaattaagttgatggttgctcgagcagctcgtgcgcctggtttgctcgatgaggatagaattgttattcttgagcaagcccaagaacttgcttcgacgggtatcgccaggtttccgaacaataagagtattctgtccgcatatgcagagctaggtttggagtatcttcgtcgaaccgggtcatacagctttttcgatgcctctatggatgagttgaaggctgcggaaggccgactcggcgacccagatattacggctatgatcagtcgcttcgaacgtcgcgcagcaggctctgaggccgaactctgaaatatcttgaaggtaatgaggtaggaattcagtccgtgccgggctgcgtccgatacgatcatctcttaaaagcgtgtaccgatcatcagctgtaactaacacgaatggcggctgtgagtcggtcacgtctttgtgcttggctggccgctgcgactttgcaaaggtcgctatctgcgcaaagccgccgctcatagctgatgcagcattatggactatgagcattttcctgtcgtgagatcttctgcagcatctctccgagtggagggtctgtctcccgccagccttgcgagcattctcgcgaggatatattcggagagacaaaaccaattatatactattgataactggggtacattctagcatagggatgtaagtcccgttatgtgaagatcatccgatgaccagaccaacccaacttgaaccaaacgtgatcactgaacagggcctacgcgagcttgctgagaaggggcatggggtcgaagtgttgtgtcagaccgtcccggaacgcaaaggaccaagctggtatggccgttggattatgcggactataggggctgacggtaaggaaaagctccttgtaactgcaaggactcgcttgacgcagaattcgatcaaggtgcgagagttcaaaacagcgacaggtgtgatttccttcttgattggcattgggttcgatcacgcagacatcccgctccgagaaggtgaaacgaccctgcacaagctactcaacggctagtggctgtgatccggtccccggtcgatgtcgcgatccttctcgacctcctattcgcgctcgccttcgatatccatcgaatggcgcatttcaaaaccgtcggccctctccggaccttcgcgcctgcgcagtgaatgaccggtactcagcccaaccacgacattcatgcaaggcgcaacgaaagggctgctgcgagcgcgaaaggcttcctgacagctgtcaccccgcagcagggctggcatgcgattttgctgcaacactgctgccgcgacgccgcatgtccggtttgagcccacattgaccgatgctgcgacaacgtccaatgactgaaatgcacagcaagccgacttcatccagtcacaggatcgttggaagcgaacgcgcgataaggccaaaggtcgtcgctgttgaaaagcctgcagccttgcgggatgctgaggaatgtctaattgtgccgttgtgataaattcctgggaaagtgcagctgtgcagaaaacatacttgggcctatttttatcctgtgctttttcagccagtgcatccgcctgcgaagtcgatgctgaatttgtgagagagagtaacagcgaaacgctgatcgcctgcctggaaggatcggagagtgatgagtttctgaatggacgaaactccgaactcgctaccgttttgcatttagccgtcgaaacagagaagaaccacctcgtgcttgatgcaatacgtcgagccgcaggcgaggagggctggcagaacttacgagaccgcttggataatgccgggcgcacggcactgcacattgctaccgagactggtgaaaccgccgaaaccgtccgctggcttttggcttggggtgcggatccaaatgcgaggtatgcggtcgaaaatcggtggaatcccttgtcctcggactacggaattacgccactccacttagccgtaatgcgccccaacagcgcggatgttgtctcggcactaatggcaggtggtgctgatccgtcgatagctcgcccgatcgagtcgaatgcagacaaatactattggcctgctttcctggtcgcgagccgtcatgccgaggacctgcgggtcctgactgccttcgcggccggtggaggggacctgagtgttgtttcaaacgatgacaacaatgcgctgcatgttgcggcgggctgggaccggccgagtggcgtgatccgttttctccttgaaaagggagtagatgccaacgcgactaacaatgaaggtcagacacctctgcatctcgctgctcgttactcatccaaaccggaaactgtggcgagcctcctcgaagctatggacgacccgtgcgccgcagacacaaaggagcgtaccgcacgcgagttgcttaaagtgaatgaggctatcgccggggaccatgcgctagatctccggtttcatgagatctgcgtcgaagggaattgagacaatatgcgacggatagtaagcttcgttcttcgcgttctcaggcgtaccgctttcttacttgttttcgtagtgttgatcctcggcagcaatatccttttgctgaccgctgacgcagtttacgacgccacaaaacgaggtctctggagtttagccagcgttgtggcagatgtcggcaccccgacaactcatcgcggaaaccgcgaagccgtggtcagactgactgcgcagactgaagtgttcgaggccgaggcgcagcggcttgatgccgagttgcggcgcgcacgaaacgaagtggtcgaactcagtgctgacaatgagacgttgaatcggcgtgctgcccgtctcgcggacgagaaggcggagctcgatcaaaatcttagacgcgctcggcgggagctaacaaacttgtccagcgaaaccgcggaactcaccgccgaacgcgttcgccttagtcgtcggcttgctaatctcgaaattcaagtcgaggagcttgatggaccacttcgcgagcgtgtcagtgcgatcaacgaacggcttgctcgacgaacttcgcgaatgatctccactaatacgtcctcaatggcgatcgaagcggtgccatatgtcggcgtcgccgcgattgtcggtgttaccttcatggaggtgcgcgatgcctgcttaaccctagcagatacccgcgagatgtcggagctgctatcgggtgagcctgaagcggaagttcctgcctgtggctattcgccagcggagttttgggatattttggcaggtggtcctgacgtgacttcgtgccgcgatctgagtgcagatgtgccagccgaacttcggttcgactgctcaactatcctgcgccctggcgaatctgcatcgccgagttttgatggtgcgcctgagttcgagaatgtaaggcgcccaggcgaatgacttattgagcgaccggcgaggcttcgaggatgtcgccgcgcaccgatggcattggtttggaaatgcctgtctatttcctgccttctgtgacggctatgttaccgattccaatgctctcacgaatgcccacaaaaacttcaaagcgctcattgctcctcggcaggcgagcggctgatatgtccgcctcccttccgttcgacagtggtttatggctgcatctgcagcgaaggtctgctccctcgattgctcgtgcagcatggggccattgcccaggtggcagatcctaagactttgcaaatgtcgctaactgcgcatagccgccaagcaggtctatctagacttgacgcatgaagcgatatgtcatgcctttttcgccaagtcggctggccagtgcagttggacccgagccgcccacttcagacgcacgttccagatgttgttcgcgccgggattcaatgaaataagatgaaataggccgggttcgtccccggcctttacttgtttgacccaccccatgccgtcctcgtcttcgcagacacagcgatgcccgatgatgtccgatggaacgctgtcgtgaccgtttcggctgtaaaacaacaagtccctgtccgaataaacgggctccatactgtctccctcaacctcaacagcaacgatgccatgcggagacaggcccggagggcactccacctgcgggccaccgcctttcgggtaggcatcgaacaccggaacctgcgcccccgcgccaactgtgcccgcgatcgagatagtcgggcgcacagagggtgcggtattcccttccaagaagttttcgaggttggtcccgaaagatgcagctatgcggatggcatcgtcaacgtttgtcgacttactcttgccctgcgaaagatttttgagttgctcataggaaacgcctgcgtccagagcgacctgtcgcatagatttgccggtggttttgatagccgcaagaaatgcgtcccgaaaagtctgttgcatgaggggtaaattaccccattgttgagcgtcgcgcatggcgtaaaatgacccttgaccgatggggtaaataaaccccattaaggggcatggaacagtttctcgaagagatcacaacctatgcggctgctgttggccgaagcccgcagcatatcttgcgtcaagccatcggtgccaattggcgccagtggaaagcctggaaggcaggacggtccagcccgacgctgcacaccgtggacaagatccgccgctatatggccgacaatcccgcacctgcggactcgccggaggcagccgcatgagccgccagcgtctaaccctgattgtgaacaatgatctaccatgcggtcatgatgcgcgtggcgctgggcaaaagtcttggtcaaatcagtttgacccgcacgccctaaaggtcagcgcgcctgatctttggtcgtcatacttccgtacccggttccacagcccgcgcgaggtcgcgctgttctgcgatgtatcgtttcagaccgcgctgaactggtggggcgccgtcacagcgccagccagccatatcgctttgctcgtcatgctgaccgaccccggcgcgcctgagtttttcggtcaggcgttggaggtagcggcgtgaatatggctcacaaaagcaagagaaatcagcacccactagtccttacttgggtcccaatcatagttgagcgcgtgaccatcctcacatgtgatcgtgcggattttcacgccagcaaagccaaattccgggtgatccgaaatttttgtgacactcgcaggcttcccgcattgtgcgcaggtatgcaggtgcgacgcttgtgccggttgaccctccaactccgcaactcgcgcttcaagcgcttcaatccgtccgggcagctctttgagccgcttccagatgggcgctttatcaaggattttcaaaatgtctgataccgaaaccaagggcgggataccttctgttgatgatggcaactcggtggagcagtcgattgtcgccaaatttggaagcaagctctccacttttgagattaccgttcgtcacctctctagcaaccgtgaagtgaaacggcgctacgagtttcgccaagacaaggcgaccgaatgaagtgtcgtcacagagaatttcattctgctgcctcctatctggttagcgggatgaaggcgctcggtggggctgcaaacccaccgcgcaacgaacacgcgccggaatacttccccgctggacatcacgggacagcggaacaccaagatcatgctggcatcaggacccggcgcggcctgagagagcaatggagcctgaaaagcttgatcaccggggcgcgggcgggcgccagaggcgggcaatcccgtcaccgtcagctattcttaggaggtgccacccatgggtaagcgcagctccttcaaacgccgcaagaatgatctgtaccgcacgccctgggggccggtgccgatattggcgccacatctgccagcgcagtttcggttctctgagccttgcgccggaaacggtaaactgatcgaccacctgcgccggatcggtgggacgtgcgccgaggcggtcgatatcaatcccgggcgcggcgacgtagtacagggcgacgccctgaattggcaaccgctgcagcgcccgcagcgcccgctggatttcatcattaccaacccgccgtggtcgcgcgtgatcctgcacccgctgattgcgcactgcattcaggtctgcccgacgtggctgctgttcgatgcggattggtcctacaccctgcaggcgcgcccgtacctgcgccactgccgcaagatcgtatcggtcgggcgggtcaagtggatcgagggcagcaagcacaccggaaaagacaactgcgcctggcatctgttcacagcagaggaccacgggcgcaccgagttcatagggagggtctaaccatgaatcccagagagcaggcctgtgcagccgtcaggcatgcgcaggaaaggcgcgacacccgcgccctggccaaggctgccgccgaggcctgtcgggtcacgcacaagatcttgggccctgcggtcgcatcgacggttccagccgcgtcgctcggcggaaagctattctcgcaagccttggcgcagctaagggggcggtcatgacggccaagaaagaggcatcggtcagcattcgccgccgtactgcattctcgacaatcccgaacgctttgatccgcgatgtggagatctcgccagaggcgcggctcctgctttgctacatcatgtcatgcagcgatagttggacgttctacgtttccgaatgtcagcgcatcctcggctgcaaaaaagacaagtggcagcggatccgccgcgaggtgatcgaagcgggctatctacgcgtccacgccaagaacggcgaaaacgggcgcctggagggatatatctgggaagtgttcgacgaaccgcaggcaccagatgcagtgtcatcagggggtagcgagccacaagatgcgggggaaaacggcaatcaccgtgagccggaaaaaccggctaccggtgcgcagccggtcgaaccctctcaccgtgagccggaaaaacccgcccgccggttgaacccgcccgccggaaaaaccggccccataagaaagaacaacaaacaaaaagaaaaacaaacaagttgcgcggaccaatccgcgcccacaacggatgtttgttcggataatttgttgaaagacttcgagcgggtgtttccgaagctggcgacagcgaaggcaacccttcgagcgatcagcagagccttggagtccggggctactgccgagcagatcatcggcgcagccgaggcctatgcggctgagcagcagggaaacgccccgcgctatatccgccgcgcagatcggtttttcgaggatggtttctggcaaacctacgttccagcccagcctgccacgcccagcgcatccgaaactgatttcgtcgaacactgggcaaagacgatacgcagcgtcgaaatgggccatttcatgttcggcaagatcagccctgacaccgcagcgaagtgcatccgtgccgggaaggtgaccgctgcggactgccgtagggctggacttcgcatcaccgacgcagaggcgcaagccatgcttgaggtggcgcaatgagcaaccatgctgaccccgacacccatggccaccgctttggagctgtggtcgtgaccgtcgatctcgcactgggcgattgcgtgatccgcgccccgcaacccagcaagggaccgttgcagactatcgaccggcaaacgcggttcaactctctcgacgagatccgcgaagcctatcgaactcaaaactggcttagccggaaacctcaacagcacccgcacgccggagacatggcaagcgccctcaaattcgcaggacagcgcctcaaggctgaacaggaaaggaaacgccgtggttgatcaagcctctgacgtttgcgcggaactcagcaagacgccagtcgacttcccattgctcgccaaggccgcacagatcctcattgaggaccagaaggccagcacctcctatgtgcagcgctccctggccatcggatacaacaaggcagcgcggttgcttgaggcattggaagcgctgggcgttgtgactgtccatgatcacgtcggacgccgtgagatagtcgcgacagaggtaccagagcggttgtttgaaatggctgcgacccaagcctcgaaggtgagttcccttccgatgcgggagaccgaggcggatagggccgtccgggagggggcagagagtgccgcatatcgcgccacagcgagcgagctccggcagtttgtggaacgcttcgagcgcctggaagaagagaagaaggccattgctgagcaacagaaagaggtcatggccgaggccaaaggccggggatatgacgtcaaggtattgagaaagctgatcgccctgcgcaaacgcgacgccgatgacatcgccgaggaagaggccgttctcgcactctataaagaatgcttgggaatggggtgacaactatgacggagcgcccactaaagaacatcacccgtgaatctcttgcgccgctttgggctcgcaaggatattccaacagagcgcatcgctcaggcgctgggcgtgacgcgtcaggccgtcagctacaaagcccgaacacttgggctgccgagccgcgcgaaagtgcgcaaacagctctgtgataacgagacgtttcgccggatgtggctcgccggtgtcaactcgacggaaatggcagaacacttcggatattctcaccgctcagcgattgggacgcgtgcaggggtgatgggcttgccgcgccggtcaggctgtaccgacacgggcaaaacaggcgggtgggttcagacgatctctctcgcgcagttcttcgaacaagatctgcgagagcggatggaggcagaagccaaagagagaagggggacgcagtgacagaacgcatgacagccgaggaatatcgggacgcccatcaggccaccaccgtcgaggaccggcgccgggtgcgcggcacgaagcgcacgactaccgccgacgggatcactcacgacagcaagaccgaggctgagcgttgggaagaattgaagctgctacaggcggcgggcgagatctgcggcttgcggcgtcaggtcgagatcgggctgatcgggcgagacgggccgatcatgaccgacggcggggccaagcagcgcgtctatcgcgcagattttgtttatgtcgacaatcgcctcggcgtgactgtgatcgaggatcgcaaaggccatgaaacggaagcgttcaagcttaagaaagcgattttggccgcacaaggcatggagatcctagtcacgcgagcaaagggctaagtcatgggcgtagtcgaggacctgaaacacgaggtggcgaacctgcgcaaactgctcgatcaggcgcagcgctccgggcagcgcaaagcctcggcctcggttcctgcgctctatcagcccgatctacccgcagtcgtgcgctatccgctggcggagtttgccgcaggccggggccgcaacgtgccgctgcccgagagcgtccaggagatcgcggaggtaatcggccggcgcaatgcggtgcgtctggtagagggcacccgggcgacaggcgcgcggaaatggcggcgacagctttacgtcccgggcagcatccccgaggaccaccggatcgccaccatgatcggcatcgaggcggcgcaaaagctcagtcacagccatgcgaactgtatcctcgagcttccgagctgccacgggcttcgcaaggcgtacatggctgaccatgcgttgcgccagtgggacgcaggcgcatccattgccgagatcgcgcaagaaatgggcgtcgagatcaagaccgcgcaggggctgttagatcagggcgagtactggcgcaagaggctagggtagctatcaaaacaagcactattcgccttggactgcagcgagttcgagccctatctggtactttacagaaggcattgagatcggcactgtggtggacgtgcgagcctgcgtgagttggtttttgcgtacatcaaagattgaaaaacttgataagtcggccttttcgtattttctaggagctccgtatgtcgcgtattaaaaacttcggctcttttttgggtggtgtcggaacagctgtagcagcaagtattggagcgtattctcttttctatccgggtaagcttgcaatcgaatccccacccgacttgatcgaaagtgttggaagtctttcatccgcacttgacggactgagcctagcgttgacggaagatgaaagcgaggcactcaagcaacggcttcagtcactggaaacgcaaatcgcacgaacgattacaacaggtgacaacgatcagcttccctttgtgccacgtagcttccaagggcttagaacctttgagcaaaacgtagcttacgactttatcgctcctaatggtgtcagccgccttctagttttcgaggatacgaactccgggagtgcgatgttcgtacaggtcgatggcgcgcccgctgaagtcaatgcttggccgacaatcggccaacatatcgatatcgagtttggcaacgagagctgtcgcttcgagttcattgacctagaacgtgggagcagcatcacatcgcgagtaaactgcagttgaaggcggtagtgcctgtactcttttatgatttctctaactgaaaccagatttgtatcccagactttgggggccgtttagtccctactcaacaggtatccctagcccaactaacttctgctttacatagccaagcgctatatctttcatcaggccaagagcaacacccccaacctgggcagcactcttcttggtttgatcccaaacgccatcgtcttcgatggataaaacataatcgtgcccttggtttgtcattcgaaaacgtgtttcagagtgacgtttcatgaaaccagcatcacacaaaagagcgatatgatagtttttcttcacctcgcttgcagacatgctgttggtctcttgactggctgcaaggtaggggtcgtcagcgagctctaaagctaacaacattcttctaatgtagtcgtcgtcacgcttcattttttattctcacatcagcagaaccggggcggggataaaggagactaatctaactcgcgaaatggctgacttagaagttccaagagttcgacaggtgtgttcaagaacaccttcttcaaatcttctgctttgatctccgcgaacggacggcatgtgtcttctctcagttttctaattccactataaaaacctttaagaccttcgtatttgattagatcctcgatccgatcaaatgcttcttggtatgcaccatacgtctgtatgttagcaccgagttgaggaaagccctcgtacatcacacgcgatatatagactttcgcgtgctctgcgagcccttcttcgagtattgtcgccttggagggccatccattagggttcaagcagtgtactagttcgtgcgagagatgcgcgacgcggaaagcaagcttatcagcttggtgactaggaattaaaatcgccacacaaaatcgatccgcctcagatagatagaccgtgtgtggatatcgacgaggcccgaaataagctccctgaagatttacaagttgatgcggttcaccgaatagctcagcaaccatactctgcacgaggactagctctgtttcgtcaacggatgctaagttacttatattaataatctctttgctcacacgaaatcctcattcacaccaatcacaccggttgcgacattctattggggagttttatgttagggaataaaacctccaaactccacgctattattgtttagaagcaaattctattgtgagccgatatcgcgtcaatgcaggcgggactcactgacaggactgccgagaagtgttgatggcaaaaccgccagaggaacccgcgccctaaacgcgcgaccttgccgaaaacgggctgagggtcgcgcgcatgtcgcttatcgaacgcattgaacaggcatccaccgggctatttgtgactgcgatcaccggagcggcttcgggcggtgtttggttggtgcgtaggatcttcaccaatcagaaacagatcgaaatgctgcagcagtcactcgaggcgcgtgacaagcagcgcgacgaggatcgcgaggccttttcggaggtccgtaaagacgttcgcgagatccgcgagatccttcaccgtagataacaggggcaatgccctgttctggggcgaaaggagagctttgcaatgcaactcattcaaaattggaaagaaacgctcaagggtgcatggtctatccgtctcattgcgcttgcgtgcttgatctcggctttccccatatttgtgtcgctggtgtcgcccggattgcttcgtgtcgacccccttatctttgccgggttggccgcagcggtgaacgcattggctattcctgcgcgcctgatcgcacaagtgggcctgtccaagctattgtccgagttctggcaagacacatcgggtgcggccagtacgaggtttgtaaagggcgtcggcgctggtgcgcttgtgattgctctagcatcgccatttgtggccaagtgggaaggtgtgcggcttgaggcctaccgcgatatcgtgggtgtgccgacgatctgtttcggcgatactcacggcgttcagatcggtgacactgcgactatggctgaatgcgtcgaccggctcgagaaagatgtgcgtgcattttattccgagatccgtccttgcatgacgaacccgaatattccggcaggtgttcaggcctccatgctagagcttgcatacaatgttgggtctggcccggtttgtcggtcgacgatgatgcgccttgcaaacgctggtaagcaccgggccgcgtgcgatgaactgcgccgctgggtgatcgcgggtggcaaacgggtgcgcgggctagccaatcgccgggccgatagcaagcgaacgctgtgcctcaaggggctgacctgatgccgctgctgcctctcctgctgatctgtgcggctttggcgtcctgcgcgaaggttgcgggtctcgtcggcggggcgctgggtggcgggcccagcgtggcggcgaacgtccaggcaggccgtaacaatgcccagaccgtcgggcaggcgacgttcagcgatcagaggatcgaggacgtgcaggcgcgcagcgtagaactgagcgcaggcgatacgcgggtcaggagtgagaacgtcgagacggtgatcgttcgcgaagatccgcctgcatggttgcttctggtggcccttgtcggctggctgctgccaacaccgcagcagatgggcggagcgctgttcggcattatcgccaggccttttcgcgggtccttccccggggggtgacgtctgtgggtgtgcctatgcgccgaaatttatgtgtgcgtgccgccgggcgaaggggttgtttattatatagatcgcgcaactccctgatgaatttcaataaagcggtttggggaggtaaaaatgcacgcgttgccgggcagggtttgaaaatcgtcactagggggcgcaagtggctgagaaaaataagaaaagcaagggtcaggaagtaaaccgggccgaactcgccaatatcaacggcgtgtcgctgccgaccgtcgatgagtgggttcggcgcggctgcccggtggttcagcgtggcgggcgcggccgggcttggaaattcaacacagctgaggttcggagctggcgcgatgatgatatccgggcgcaggcgagccacaccggaatggcgaccaaagacgaactgacattgcgcaagctcgcagcggaaacggaacaagcagagcttgatctcgcgcgggccaaggaagagttggtgccggtggagcagttcgaccgcgcccttgcgaaagcctttggcgaggtgcgcgcgggtatccgcaacgtcctgcccagccgtgcagcgcggcgcctgatcggtgaaagcgatgaaacgcagatcaaggcggttttgctggatgaggtcgaccaggtgcttgaggcgctggcagatacggacctaattaccgaggcggatctcgacgaggacgacgaagaggccgaagagggggccgacagtgcgtgaacgcccgggctgatttctcgaatgcgcgggctgttgtccgcattgctcggcgcgcccgggcatttctgcgcccgccgccgaacctaaagccgtcggagtgggccgaggaaaatatcaagatccccgtcggaaacgctgtgccgggcaaaatgcggttcgacaacgcgccctatcagcgcgaagtgatcgatatgaccgcagatccgcggtgcaaccggatctcgctcatgtggggcgcgcaggtcggcaagacgcagaccgcgcttgcggcgcaggcctatcgcatcggcttcaatcctgtgtctcagatgatgatgcagccgagccaaggcgatttgacgacgtggctcgagaccaaattcaacccgcttgttgaagagaacgaagacctcgccgagctgatcgcgaagccgcgcgggcgccaaggcgtcaataatcagcgcatgaagagttacccgggcgggtttctcatgttcagttggtcgggttctccgaagaccatgcgcggacgttcggcgccgttcattgtttgcgatgaaaccgacggctacgaccggacaaacgaaggccacccggtcggcctgctgtggcaacgggcggcgacctttggtgatcagcggctcttgttggaaatcagcacgccgacgatcaagggcggcagctggattgaaaagtcctttgaggcaggagaccagcgctatttttacgtgcggtgtccgcattgcggccacctgcaacggctgaactggtcgcaggtgacctggtccaaagacgccgacgggctgcacctcgccgaaacagcaggctatctgtgcgtgggtgagggatgcggaaccgtttggagcgatggcgagcgagtggcagcgatccgcaacgccgaacgcgacggcggcggctggatcgccagcaagccgttccgaggtcacgcgtcctatcatttgtcggagctgtattcctgctttcggcggctcgaggatatcgtgcagtccttcctcgacaaaaaggccgcgggggatttgcaaacctttgtgaacgtgtcgctcgctgagacatgggaagaggaaggcgacaagctcgaggcgtccgtgctgatggcacgggctgctaagttcgcagcaccggtcccgttgggggcaggcgtcctgacggctggtattgatatgcaaaacgaccgcctcgaggtcgaaatagttggctggggcttgggggaggaatcctggtctgtcgattatcgggttttgtggggcgatccgctgcaacaggacgtctgggacgaactagacgccttgctgtcggaaacatgggagcacgagagcggagcggagttgcgggtctctgccgcctgcctcgataccgggggtgaaggtgggcgcacgcaagcagcctatgactatgcccgcaagcgtttgggccgcaaggtctgggcgatcaagggcgtcggtggctggggcagacccatcgttacgcagccctcgaaggtcaaacaaaagggcgtgcgccccgtctacttgcactccatcggcgtcgatgaggcgaaagccgtagtcgcccagcgggcgcggattagcgacgcggggccgggccattgccatttcccggcagatcgggatccggcgtggttcgatatgttcaccgccgaggcgctgcgcacccggtatgtgaaggggttcgcagtccgagaatggcacaatgtacgcccacgcaacgaagcatttgactgccgcgtctatgcctacgcagcgctgcgcatcctgcgcccgaatatcaaacgcctggtcgcgtcactggatgttcaggggcaggagaccgaggacgaggccgtcgagatttcaccagacgctgagcgagctttggtaaaaccgccagaggaaccggaagccccaaacagccaagctccgaaaaagactggctggggggcgaagaagcgccgacgccgtcgcaggtattgagcagggttaggacgtgggcgcaattccaactgaaatcggggcagggttgacgtttcgggcagtggtcgagcaaccgatttttccggcgccggagtgggggctttctctcttcctgcgcggcaagagctcgattgacttgattagcgctgcgagtggtgtggatcatatttttgaggcatctgcgttggtcacggcctcttggcagcccgggcggtatgcctacgtgatccgtgccagcgacggcgctgatgtgcatccggtcgagcgcggcgaagttctgatcgcgccggatcttgctgcgcaaggtgagaatttcgacggacgcgatcatgtgcgcaaggtgctggatgccatcgaggcggtgatcgaaaaccgcgcgaccattgatcagcaaagttacaccatcaacaaccgatcactgcagcgcacgccgttgtcggagctgatgaaactgcgccatcaatatcgtgccgagctggcggctaagaaagcgcggcggcgcggcggcttcgggcgcgcgatcaaggtgcgcttgacatgatctggcgactgttcagacgcgaagatcctgttgcgccggagccggatcgcaagccccctccaatgctgacggcaccccgaaggcgtggccagcgcatgtttgccgccgcagagacagatcgcatgacaagcggttggaccaattcaccaatgccagcggatcaaatcatccgccgcaattggcgcgtgctggtggcacgttcgcgcgagcagtcggcgaacaacgactatgcaaaggcgttcaaggccagcgcacggcgaaacctgattggacagaaggggttcacactgcaggcgcaggcgtttgacggtgacaagctggacgcacaggcaaacaaggccatcgaacgcgcatggcgcgcctggtgcaaggcgatgaattgcgacgtcaaagggcgtcgcaccttacggcagatccagaaaacgattgtgaacggcctttgcaccgatggcgagtttatggtgcgcatggtggttgggcgggatgcgggcccgtggggatttgcattgcagatcctcgacccggtgttgtgcccggtcgattttgatgaggatcgtcgccccggtggtgggttcattcgggcagggatcgaatatacgaagatgggccgacccgtggcctattatttcaccaccctcgatcaatcgcaggccgattatcactattccgggcgggcgttcatccgggttccggcggatgaaattatccactggtttgaagaggattttgtcgggcagaaacgcgggctgccgtggatggcgaccgcgctcttgcgtatgcgccaacttggcgagttcgagaaaagcgctctgaacaacgctcgtgaaggcgcgaacaaggtcggcgtgatcgaatgggacgaagggttcggccctgagccagaagaggacgacgccaccaagagcgacgatgatctaggctttgaggacatcgaactcgatagtgaaatgggagtttatcatcagctcccgatgggtgcgcgtctaaagcgggtcgaaaccggatatccaaacggcgaaatggcggtgttttcaaagcacatgctgcgcggggtcgcgacaggcttgggcgttgcctacaacgatcttgccaatgaccttgagggcgtgaatctatcgagcatccgccacggcgttttgagtgagcgggaccagtggattgagttgcaagagagcctgatcgaggcctttgccttgccgatctatgagcgttggctcgaatactcgctgctgaaacagaaaatcaccctcgacaacggatcgccgctgccagcgagcaagcggtcgaagttcatggcggtgaccttccaggcacggcgctggcagtggattgatcctgcaaaagacgtgacggccgacgccgacgccgtcgacaacctgttcaagtcgcgcggtcaggtgatccgcgagcgcgggcgcgacccgcgcgaggtctatgccgaggtcgcagaagatatcgcagcgatgcgcgaggcgaaaatccccgacaacgtgatcgaggccttgatcacagccaaatcaaaaggagggcagggcagtggacagccagccaaaaccggcaccggagaaaccgacccagacgccgacccagaccccgacaaaagcgaatgacattatcgggcggtcgttgacccgcgaagtcacagcggagcagatcaacgcgcgcggcgagggcggtgcgatgcgccgcatgggagaggtgcgcgaaatcaacgtcgaggcgcgcactgtcgagcttgccttctcgagcacgaccccggtgcggcgctggtttggcgatgaggtgctttcccatgacgccgaggccgtggttctggaccgtctgctcgacggcggggcagtattggtcgggcacaattgggacgatcaggtcggcgttgtgcaaagtgcgcgcgtcgattccgacggcgtcgggcgcgctgttgtgcggttcggcaagagcgcccgcgcgagcgagatctttcaggacatcgtcgacggcattcggcagcacgtctcggttggctaccgggtgatcacgatcagcgaggaaatacgggaaggtcagccgaaccttatcacggtcacgcgctgggagccgttcgagatttcggtcgtaccggtgccagctgatccgacagtcggcatcggtcgcgcgctggaaaatccgccagaggcgggcggggcggatcgtggccaaactggcgaagagaatgcgggcgcggtggccgagcccaacgatacaggacaaagggaaacacagatgaaaaccatcatcacccgcgacgccgagggcaatcttgtccgggccaaggtcgacgaaaacgatcagatcatcgaagtgatcgaggtgctcgaacgtgcaggcgcagcggaaactgccatgctgtcgcgtctgcaggagcaggaagcggcccgcgtgcgcgaactgaccgagttgggtcgcgaatacgacgcgccggagctcgcaacagaaatgattgccgggcgtcatggcgtgaccgacatgcgcgaacgcctgcttgatcacctacaccagcgcagcaatgaaagtcgccaaatttctgagcgttccagcattggcctgaccgacagcgaaacagagcagttttcgttcctgcgcgcgatccgggcgctggcaaatccgacagaccgcagcgcccaggaagcggctgctttcgagttcgaggtctccgatgctgccgccgaggcgcaggggcgcgatgcgcagggcgtaatggtgccgatggacgtgctgatgcgtgcgccgctgaacacgggttccggtggcgcgaccgctgccgataccggcggcaacaccatcgcaaacccgttgctgacgcagagctttattcagatgctgcgcaaccgtacgatccttttgcagctcgcgactccgctgatgggtctggtgggcaaccctgatatcccgacgcaggaaggtggtgcgaccggctactggatcggtgaggatatcgaggcgacagaggatctgctgtctctgggtcagcgccagttttctccgaaaactgttgcggcctattcggagatcacgcgccgcactctcaagcaatccagtttggatatcgaggcgctggtgcgtagtgaccttgcgctcgcattggcaacctcgctggattttgcgggtttctatggcaccggcgccaacgatcagccgctgggtatcgcgaatacgagcggcgtgaatgtggtcgactttggcggcgcagcgtctggtggcggatccgccctcccgacctgggccgaagtgatccagatggagagcgagatttctgctgcaaatgccgatgtgaatagcatggcgtatgtgcagaacgccaagatgcgtggtcacttcaagagcacgcagaaattcagcggcacaaacggtgcgcccatctgggagagcgacaacaccgtgaacggatatcgcggcgaagttaccaaccagattaaagatggtgacgtgttccacggtgatttcgcgaacgtcctggttggcatgtggggtggtctggatattacggtggacccgtacacccacagccgccgcgggcgcctgcgcatcgtgacgatgcaggacgcggattatgttctgcgtcacccggcgggcctctgcttcggcactgacgccagctaacccgagcacgcattaaatctctggcctgatcaggccagagacaccccctgaaaaaggatcgaaaacgtggctgataccaagaaaccgcagaaaaagattttcgccgtcaccagtgcttttgtctgggataaggcgatcaagaagccaggcgataccgtcgcgttgactgccgcagaggctcacgggctgaaagagcggggcaagatcgaagaaccgccggagaaacctgccagcaagaaagctgctgagacgggcgcgaagaaggcggcagcgaccgacccggccaaaactgatccggcagccacggccaaagcgcccacctgatgccagcgccgagctgggataatcccgacgccttcctgtcgacggacgactttgcccttgaggtaaccgtcacgccacggggaggcgtttctcgtaccatccgcgggatcttcgacgagccttacatgaacgcccagattggtgagtatgaggctgacagctccgatccgcgcctgacttgcaaggcgtccgatgtcgccgacctgcgcgacaaggatcccgtcgtgatcgaggggcggacctattacctgctgacaaatccgcagcctgacggaaccggtttcgcggtgctgcacatggcgacggagtgatcgcgtgtttgctgccttcgattttgatcaaggcgaactgaggcgcatcgccgaagagtttgacgccagcgaaaaggatctgcgcaacgcctattcccgcgccttgcgtcgaaccgcgcaaaccatgaaaactcgctcgcgcaagggactgcgaaccaagctgcaattgcgcaccgctgcggagctacgccgacgcctgcaagggtttcggttcaagcggaatggcgccatggggagcgttcgcatgtggttcggcctgaatgatatgcgggtgtcagccttcaagggccgcgcgtccaggacggcgacaggagccagctatgccgggcacgatttcccgggcgggttcattggcagaaatgcaaagggccgccctacgatcaaacagcgggccggatctcgtgcctatccgatcaaagaggcgaggatgcctatcgacgatgaggcccaaacctttatcgaggacgaagtttttgacgagatcgaagaggtattctttcactattttcgggccgaggtgcgcgcccgtacgatctatggagtgggtagctgatgtccagaaacgttgatctgatcgcgatgcacgacgcaatactcgcccagatcagggccgactttcctgacctcgccactgtcggtgactatgacctcgataaaaaggccctgccggtgcctgcggtactggtcgaactgatcgacctagaaggcgatccggatgcagaccccggcaccgaacaggtgcctttcgtttcaaaatgggtcgcccgcgttatcctcggctttcgcacagagggcgtcaaacgtgaggttcgccaattgacggccgcgctcgccgccaaagttcatcgccagagatgggggcaaagggttggtccggcacaggtgacgtatatcgggcctgatgctttcgaccctgaatttgacaagttcgaggtctggtccgtcgaatgggatcaacagatcgatctgggcgaaagcgtgtggaccggcgagggcgtcgttccagaggtggtaaatgtaggctgggcaccagatatcgggccaggcaatgaggatgaatattccgaaaccgtggaggcaccgctatgagctatggcgcggcaagaaacgaacaagtgcgcgaggggatcgtgcggtttggtgtgattaccgccgttgacccgggcgccgctcgcgcgaaggttagtttcggcggcgagagcgaaagcgcttggctgtcatggtttccgcttcgcgccggggcaatcagcgtctgggctccaccgtcggagggcgagcaggtcatggtcttgtcggaatctggtgacaccgcgcaaggcgtaatcatcggctcggccttcagcagttctaaccctccaacagccggagcgggtgggttgttcaagatccaagtcggcgattcctcgattgagatcgatgaaaacgggatccggattagcgcacccaggatcgacctgaactgatgccggctgttaccagaaaaggcgacacctgcacgggccacggcaactatccttcccgctcgagcactggcggtagcggttccgtctatacaaacggcaagcctgtccacagacagggagatggctggtcggttcattgcaatccagtaccgatttgccatggcggcatccttgccaccgggtcgagcaccgtgttcgttgagggcaaacagattgggcgcatcggtgatcccgtcgattgcggttcctccgtcgcgagcggctccgggaacgtgttcgcgggtggataggaaaaccgccagaggcctagtggagctgatcacggcaatgatcggcccatgattggaatagacgcatccactggcaaacacatgtctgatctggcgcatctgcgtcagtcggtgcgtgacatcctgacaacgccgattggcacccgtgtgatgcgccgcgactatggaagtcgcctttaccgcttggttgatgcgccaatgaatgacgcaactcgactagatatgatggcagcgacctacgaagccatcgaaacgtgggagccaaggcttcaactggaaagtgtttcgctcgagggttccgaacctggcgcaatcgtaatcgctttggcgggccagtatcttccaacaggtgagcctgtgtttctcgaaggaatagggctcaactgatggctggcggctttgcatcaatcaatctgtctcagttgcctgcgcccgatgtgttgcaggctatcgactacgaagtcgcgctcgcagaaatgctatctgagctcaggcagagagatccggcttttgacgctctggtcgaaagtgaccctgcctacaaaatcctcgagatcgcggcgttttatcgaaccttgactattcagcaggggaacgacgcagcgcgagcagtgatgcctgcctatgcgacgggttctgatcttgaccatattgccgcccgctatgctgttgaacgattggtgatcgatcccggtgatcctgaggctctcccgccagttccccctgtccttgagaccgacgacgcattgcgccgccgaatgttcctcgcatttgaagggctgagcactgcggggccgatgggtgcctatgtgttccatgcacttggcgcggatccggacgtcggggatgccagcgtgcaaagccccgcgccgggcgaggtgctggtcacggttctttcccggtcgggcgatggtgctgcgcctgcaactctgctgactgctgttgatgctgccttgaacaaggatgatgtgcgcccgcttacggatctcgtgactgtccaaggggccgcaatcatcggatataccatcgaggcggttcttactgtcttacccggacccgatagtgcggttgtgcgagacgcggctcaacgcgcagcactagagtatgcaagccagcagcaccgtatcggggcagatattaccctttcggggctttatgctgcacttcatcagccaggagtgcagaacgtcgcgctgatcagtcctgcagcagatattctggtagatgcaagcgaggcggcattctgctctgctgtttcagttagcattgggggcaccaatgcctgaaagccttctgccgcataacgcaacgacgcaggaacgcgctttggaagcagttagcgggccgcctctcttcacgacagcgccgctccgcgaaatctgggatcctgatcgttgcccggttgagcttttgccatggttggccttttctctctctgtagatgagtgggatccttcttggagcgagcctgcaaagcgtgaggttattcgccgctcttttgtggtccatcaacgaaaagggacacggggtgcagtcgctgaggcgctcgaggcgattgggtttgtgcctgaaatcgtggagtggtttcaggcagatccgcgaagggcaccccatacttttgcactcaagcttgatgctgtgcgcgactttaacagccctgagagtatccagcgcgcactgcgcgcagttgatgaatcaaagcctattcgggcgcacctaacatcagttcaaatctcgaccgcaacagtctctgaacccgtcgccgcagcggcggtagtggtggggcaagagatcaccgtgagcgcagcatgaagggggtaagatgacacagatagttgcaattcacaccaccgcaggactggcgcttttggcgcaagctcagggagagggggcgctgatcaccctcggcgatatggcggtgggcgacggtggtggcgcggcaattgtccctgatccggctatgactggcctcgcgggagaggtgtttcgggccgcgatcaatcgcgtctatcagcccgatccgattggccagcccaccaaatatgccgccgagcttgtgatccccgccgcaacgggcgcttttgttatgcgcgaggtgggcctttttacagatgatggcacactttttgtagtcggcaacctgccggagacatacaagccggtgcccgccgatggcgcgttttcggacaccctggtccgtatcgagttccttgtcgccaatgcaggcacaatcaacctcactattgatccagcagtggtgacggccacgacggcatgggtgatcaattatgttgatggccaagtctctgccaaatttgcaaccgatccgcaggccattgcgggtgtcagcacagacacaatcatgtcgccacatgcggtcaaattggttctggatcaggccgtaaatgatttggtggctggcgcgcccgaagctttgaacacgctgtccgagatcgccgctgccatcgccaatgatgaaaactatgcggataccgtggccaatctcttgaaacccacgcgcgcacggcgcgcttacctcggaggtcgctaacatggcgagcggatttatcaaggcgcgagcgaggttgtcggcgggtgtaaacaccgccctctataccgttccggctgcaactggtgcggcaatcaatatcaacgtggcaaatcatggacccgatgcggcaaccgtaaaaattgcgatcacggatggtagcgcgcctgctgatggtgactggattgaaaccggacattctgtgtcccttgccaacccacttctccgcaccaatgaaccgatggcggcgggtgaggtgatctatgtccaagcttccaccgacacagtggatgtgagggtttcaggttatgaggaggacgtctgatggcgcgttttgcatcaggttcggaacaagctagcgcagcagcagtggggatcggaaccaatacaatttcgggccagaaaatcctaccggcaggctacatgggcgagttcggctcgggcatgtggagttgtttccaacagcccgggacacacatcttcatcgttcccgcaggtgtcacaagtctacgtgtgcgtgttgttggccccggcggcggcgggcgcggcaatgacggctacggcggagccggaggtggttatgcacatggcgtttttgacgtcacaccgggcgacagcttcgacgtaacggtggggcaaggcggcgacggtggcgatttcccaacttcgggcggcacgtcgtcttttggcgctttgatttcggccacgggcggcactgcatccgacgacagcaacacgcccacggtcggaggccaaggctttggtggcgactttcaggcatcgggcggggtgtcggggcaagcccagagaactgggggcgggggcgctggatcacagcttggaaatggcggcaatagcgccgcgtttgtccaatcgggcggggcaggcgtgaacaacggtcacagcttcgcttatggtggcggtgggccatttggcctagcagacttgcaccaccacggctggcatgagagcgacaatttcggtgcgcccgacattcttggccatcaggccggaatagagcgcgcaagctcatccgagaacccctacacgtccttcaacccgataaacgctgttctacgatttccgtttgatgggttcgttggcggcggtggagagggcactgagtatcaaggcgctccgggagggattggcggcggcggtggcggtggttggaatacaacatcacaccacggtggtcgcggcggtattggtggcggtgcgggcggcgggttctccggaggtcgcaaccacggcggcattggcggcggtggcggcggcgcccgcggtgatggcggcaaaggcggacatggcctcgtgattgtggagtggtaaaatgaaagcgcgcattcaaaacgacgttgcagtcgatgtgcatcctgcacccgagacagcatttcaccccagcattgctgcgcagttcgaagcggtgccggacgaagtagggctaggctggcggcgcgatgcgcaaggcacttgggtagcgccacctgagccgggaccatcaaatgagccgaactctgggcaaatgcgaaccagtgtaacccgcaccgaatactacggtctgtttacccctgatgaggaagcaatgatccgtatcgcggcatctgaacaggtcacctctgacaagcttaacgccgcagatgcgccggaaaaggctcgcttgatgggggtcgccaaattggcagtcatgttgcagcggattgatgcgctcgcaccaactgacaatgttgatctgggtaatccgcaaattcaggcgggactagatctgctggttgcagctgggcttttgacgccagaacgaaaggcggaaatctcgagcggtgtcgaggcataaatggcgcttgatacgtcatggtgcatcaagggtggttcgcgtggctatgtaaccacgcgaaccgtaacctggcacctgatgtggaaaacatcaccatttgttctgacaattccgccgggccgtgaatttgaaagctctgtacctcgcgttttgcaatggatctggtcgccagatgatccctattaccttaaagcggcattgatacatgacacgcttctcgagaacggatctcgcgctttcgaggccgacgcacaatggcgagcagctgctttgagcgatcatgcgcccccacttcgcacgaccatcgcttttgtcgcgatgtgggcccgccgcttaggtcaatctgcattgggactgtgaatctcggcattgggaatctgaccctctggctataccgaaggaaaaccgccagaggcgcttatcgctcgcgctcgcgatgattgcagcaacatgcaatttgcagcgagggtaaaatggctgggtttcttcacggcgtcgaggttctcgagatcgacacgggtccgcgcccgatccaagcgatcccgaccagtgtgatcggtattgttgggactgcgcctgcggctgacgaaactgcctttccgctgaatacaccggtactggtcgcaggcagccgccttgaggcggcaaagctcgacaccaccgacgacggcaccggcggtggaacgcttcctgctgcgctcgacgggatctttgaccagatcggcgcggttgtgatcgttgtgcgcgttgacgagggcgtcgatgaagcagcaacgctcgccaatgtgatcggcggcgtgaatgcgacggacgggcaatttgagggtgtgcatgcgctgtctggtgcggagagcgtcgtggggtttgcaccgcgcatccttatcgccccaggttggacgcatcagcgcccagaggacgcaggaaatcccggctcctatcttgcgaacccggtggtcgccgagttggaaggcattgctaaccgtatcggcgcggtgatcatcgcagacgggccgaacacgaccgacgcagatgcacacacttacgctggcgattggggcacttcaggtcgcatctatgtcgttgacccttgggtgaaggttctcgacagcgcaggtgaggtggtcaatgaaccggcctctgcccgggttgctggtgtgattgcccgcactgacaatgacgaagggttttgggtatcgccctcaaataagggtatttttggaataatcgggacctcgcgcccggttgatttcaagctgggcgatcaggcaagccgagcgaacctgctcaacagcaatgacgtcgctacgatcatccgtcaggacgggttccgcctttgggggaaccgcgcgcccacagccgatccaaagtggcaatacctctgtgtgcggcgcaccgcagatgtgttgaatgaaagcatccagcgcacgcatctttgggccgtggaccgtgggatttccaagacctacatcgaggacgtggtcgaaggggtgaacgcctttatcgcggggctggttgcgcaaggtgcgatcctcggtggtacgtgctgggctgatccggatttgaacacccccgagagcattgccaacgggcaggtgtggttcaactttgactttacacccgtgtacccagccgagcgggtgaccttccgctctcacctgacaaatgagtacatcacggaggcgctgggctaatgtctattcgcaacattctgaaaaacttcaatctgttcgttgacgggcggggctttgctggtgagctgggcgactacaccccgccaagcccgtctatcgcaaccgaggaataccgcggcggtggtatgaacggcccgatcgatctcgatatgggcatggaaaagatgaccacctcgtttgtgttgcgcaactacagcgcagacgtgttggccctctggggtatcgcgccggggcgtcggatccagatcaccgcgcgcggcgctctggaaagcgaggatggcaccgtcacgccggtaatccacaacatgcggggaaagatcatcacccctgatcgtggcacctggtcgcccgggcagtctgcgaccctcactgtaagcatgacgcttgaagcgtttaaggaaaccgtcgggccgcgcgtcgtttgcgatatcgacgtgatcaatatgaagcggatcatcgacggcgtcgatcatctggcagagcagcgcgccgcgctgggcatctaaggagcaaccatgcaaaatccggcacttccttcctattgcaagcacaacaccgacggcgatcaggagtccgtgaccgtgacgcttgcaaagggcatcaccgttggcagcgaaaaacgcaaagaggtcaccctgcgcgaaccgacggcaggcgacaacatggccgcgcgccaaatggcaaagggtgacaacgccgttcatgaaatcacgctgattgcaaatctggcagatctgtcgcccgaagaggtgcagaccgctccgatgcgcgactaccgccgacttcaagaggcgctggattttttcaatggctgacgcctgaggcggcgcgcctcggcgtgctgctgatcgcacgcgagaccggctggtcgtgcgccgagatctccgcaatgagcgtcagtcgcatgacgtggtggcttgaaggcctgagggaaatcaatggcaaaaaatcagcgccttaacgccactgtgaccatcggcggtgttgttgaaaattccttccgcaagggtatcggttttgtccggtcgggctttgacaaggtcgggcaaagcatccgcgatgttaaagaacgccagaaagagctttcgcgcacgcgcaaagaccttgagaaacagggcaaatcggtcgagcacctggaccgcgagtatgaagcattagagcgcacgctcgaggatctggcgcgcaaacagaggcgctgggagcgcgcgatgcgcgacagcgcccgggtcggcaaaacctttggcgatatgacccaacggatcggacggctcgcaaggcaatcggcaattggaattacagcggttggcgccgggatcttcgcgctgaccagttcaacggcttcatacggtgaccaggttgccaaaacggcagggaagctcgggatcgggatcgaggcgttacaggaataccgctatgcggccgagcgctctggggtgtcgacagagacgttcgatagctcactgacagcaatgcagaagcgcctgggcgaggcagcgcaaggcacgggtgccgcgaaaaaagcgctcgaccagatcggcctgagtgcaagcgacctgatagccatggggccagagcgcgccatgggtgcaatcgcggacaaactgcagggtatcgaagcgccagccgaacgcgcggcgattgctgcggcattgttcagccggtcggggatcggcatggtaaacatgctcggaaacggatcggatgcgctggaacaactgcgcgaagacgcccggcgcaccggctatgtcttgagcgaggaagctgcgcgggacgcagaagcttttgccgacgcacagctagatgcgcaactgtcgatcaaaggcctgaaaaacaccatcgggtcagagctgatgcctgtggtcacccggtcgatgcagcggtttagcgaatgggccgtgaccaatcgcgacgacgttgcagcctttgctgataccgccgcaaccaagcttgaggcagctttgcctgtgatcggtcaaatcgccgagggcatgggtgatgtgtctaaggcagtcggtggcgtgatctccaaaacggcggaaatggtcgggggctggaagaatttcggaatcgtcgtcggcacggtcttggccggtcgcaccatcgccagcgtgctcaatttcggctgggcggtcggtcgcctcggcgtctctatggcggcgcttgtgccgtggggggccgcaggagctggcgcgatgaagttgttcgctggtgggcttgccctggtcaagacgggcgttcttgctgtcgggcgggctttgctgatgaaccccattgggcttgccgtggccgggatcgcgggatctgcttacctgatctatgaaaactgggagaaggtcgggccgtggttcgccgaactatgggatggcgtgaagggtcatttcggcgggcttggtcgatttgtctctggtgtctggcggggtgacatggatgccgccgctgcaggcctgtccgacgcttggggatcagcaaaggcggtcttctcgacagtgttcgacgggatcactggagtttttcgttttgcatgggagaacgggataaagccgatcaccgacaagctggggattacaagccacatcacagcagcgtgggacatcgcccgcacgatgatcgggaccgctattggcgaaatcggcgtcgtgctcgaaactgcgtatgacggcagtatcggacctgtgatcgaggcactgggcgcaaccggcgggatctccgccgcgtgggaagaggtcaaaaccgctgtcggcgctgtgatcgaatggctggcgcaaaagttcgtttggctgatggaaaagctgcaacccgtcctcgatggcctgtcatggctccgggacaagggtgcgggagccgtcgcgggcatccagggaatcggcgacagcatcagtaacggtgtcagcaatctgttcggcggtggcgatagcagtggcgatgaagggccggccaatccgcgcagcggtcgcgcaaagcccataaggatttctggttcctatttaggcggcaccatcgggcgtggcttccgcgaggttggagaacaagggcctgagacgatctggacctcgaagggcggctatgtggcacacgcaaacgcgacagagcgtctggcgcgtctgtctgagcgcgctgggcctgttctggatgctttgggtgctggcctgcagagggccatggcgggcgcgcagcaagccgtcgcgccggtgttgcagcgtatcgaggtcacaggcgatcagatgcagggtcgggtagcttctccgcagacgcatgctgctcaggccgcgccggttgtgatccatgcacaaattcatgctggcagtatgagcccgcagagtctcatcgacgagctcgagcgccgcgggcgcgaagcgcaggcaggggcgctctatgaccaggctcacaattatgggcaatacgggggcgcatgatggccggaacgatgatgcaactcggcgcctaccagttcagtatcgacaacgctgcctatcaaaaccttgagaggtcgaccgaataccgctgggctgcgcaggagcgtgtcggcgcagatgacgcattgcaattcacgggatatggcgaggacacgatttcgttgcgcggagtaatttatccacacttcaagggcgggctggcgcaactagacaagatgcgccgtcaggccgccatcggcattccgttgccgctcattgctggtacagggcgcattctgggcgtttgggtggtcaaaagtgtgcgagagggccaacggacctttacgcaccatggcgcgccactgtggcaagaatttgggatcagtattcggaggtacgacggtggactccgcagtcttctaccattctaaggaaggtgaggccctcgatgagattgtctggcgccactaccgcgcagagatccggggcgcgttcgaaacggtgctcgaagcaaatccgggtatcgctgcaatggggccgatcctgccgctgggaactcgggttaaactccccgtgatcgatacacccaaagaagcagaaagcctgcgcctatgggattgatggatttcagaccgtactttcgagtcactgttgacggcaaagatatcagtggcgttcttgcgccgcggctggtgagcttacgtgtgacggatggcgcaggcgtgcagtctgacactgtcgagatccgcctaagtgacacgaacctgtttcagaggatttccgaaccccgcgctggcgctgaaatcgaagtctggttggggttcccgcttagtctgtcctacatgggcttgtttgtcgccgatacgattgagacgggcgggccacctgataccgtgacgatcaccgggacggcatcggtgaacggagaaaccacaagcggcaaaacggcgcttaccgatcagaaaaagcggagctggcccgaaggcaccacaataggggcaatggtcgaaaaaatcgcgagcgagcatggcctgatcgctatggtgtccgaaagcctgcgcgcagaggctttgcctcacatcgatcagattgacgaaagcgatatcaatctcttgtcacggatcgcgcgggattttgatgcgattgccaagccgggcaatggccgactgatcatgaccaggcgaggggaaagcctaaccgcatccggccagcctctcccggtggtgagagttgataaatcatcggtgaccgaatggcgctacaggaacagcctgcgcgagcgggttgggcgcgtaatcgcgaccacgcaggatctcgaagctggtcagccggttgaggtagaggccgggcaaggtgagcccgccttaaggctgcggcgacgcttcccggacaaggtaacagcccggaaaacagccgaatccgagttaaagcgcttggggcgagcaggacgcagcctttcaatcaccatgcccggaaactccgacatagtcgccgaggcgcgcctgagcgccagtgggtttcgatcctacattgacggagaatggttggtcagccgggcaacccacatcctagacagtgggggatatcgcaccgcaatcacggctgagccggtagaataggcagctgcgcgagtttcccggtttcctagttcgttctggctttgtttggggaaataaaaaagctaaggcgctgatttgcataaatccgcgctagatttaggttctggcgccgcaaggcgtgggggttcaagtcccttcacccgcaccacttctccataagtttcaaactagacgctgcgcttttgagcgtggccagtctttgcctgatgatgacgccatgtcccatgaggcagatcagaccagatactgcgttggggcttgcaatataggcccgtcccattcaccattttgatccgaaccacttctttttgatcaatatcgattctatttttcatagaccccgatggaattgcgacattcctttggggcgttttgcgacatggtttttggagtagcagttgaagaacatcgatggtctttacacagtcgaatttgtaacccccgctctgcgcggatttggagtcatcagttttgcgggcgggcgcgcgcgcggaggtgacagtatcatcgcatacgacgggaactattcgcaggcaggatctgatgtggcgctcgaactcgaagcgtttcgacacgcgcataaaaacgacatggtgccagtctttggcaaagagcatgtgagcatcgcagtgaacgcaaaactgctgagcaacaaccgcatcgtcggcaccgccgcaagccgtgatgcgccggatattcccatgaaactggtatttacaaagcttcgggattaaggctctcgggaaattgaaaacgcctgccgaatatttcgacaggcgtttttgtttgtcttcaagttggcaggcttgccgaggttatttctccgggatcagaccccttgggctaaaccggagcaccagcagcaagaccagccccatggtgaacaggcgcatatgtgaggcactctccagaagatgtgcgcgcagtccgctgtcctcggacatgccagaggtcacaagctcgatcagcatcacgcccatcggctccaccttgatccacaggaaccacaccaagagcccgccaagcaccgcgccgaagttgttaccggagcctccgacgatcaccatcacccagatgaggaaggtaaaccgcagcgggttgtaggtgccgggtgtcaactggctgtcgagcgtcgtcatcatcgcaccagccacgccgcaaatggccgaaccaaggatgaagacctgcagatggcgccgggtgacatgtttgcccatggcgttggcggccacttcattgtcccgaatggcgcgcatcatccgcccccaggggctcttgagcgccatttgtgccatccagaggaagaccagcagcacgaccgtgaacatgagcgcatagcccagtttcacgtagagcgtggaggccgtggtggcatccatgccccaagccgcagcctggttcacgaacgcaggatctgcttgcaaatcaacctcatagggcagggggcgcggcaagccgacgacgtttttgacccctcgggacagccagtcctcgttcttcagcaccgcaatgatgatctcggcaatgccaagtgttgcgatcgccagatagtccgaccgcagccccagcgctgtcttgccgatcatccacgcaacacccgccgccagcagaccgcccagcggccaggccaggagcacgggcaggccaaagccgccaatgttgccctcaagcgcggggttgatcgactcgatggcttcaacaccgggatccagcgctgcgcggtaaaccacaaatcccacgatcaggattgcaagcagggtcagcgtgcgcgccttgcccgccgccatcacccgatagctgtagattgcggctgcgatggtcgccgcacccagcaccagcgccagcaggatttgccaaccacctgcctgccaggcaccgggggtgggcggcatggaggtcaaaaccacggccagcccgccaagcgcggtaaagcccatgatgccgacgttgaacaacccggcaaacccccactgcagattgaccccaatcgccatgatggccgagatcagccccatattgaggatggtcaacgcagagttccacgatcccgagaaaacgccaaacgcatttgtggtcccctcgagcaccagcaacaggccgacgaaggcgaacagaagcgtatgtttcaacgtatcgctcataccgcttttcctttgaagataccggtgggtttgaacagcagcacaacgacgaggatcgcaaaggaaaccgcaaatttgtaatccgtgctcagaagctgtgcgagcccctctggttccaggctttcaggcagcaggtaaccgcccacttttttccaagcgtaggtgatcatcacctcgctcatggcgatgacaaacccaccagcgattgcgcccagagggctgccgagaccgcccacgatggccgccgcaaagatcggcaggagaagctggaaataagtgaaaggtttgaatgacttatcaagcccgtatagcgtgccggcaatggtcgccagtgctgcgacgatgatccatgtgatcatgaccacgcgttcgggattgatgccagacaacagcgccagatcctcgttgtcggaataggcgcgcatggatttgcccgttcgggtcttgttgaggaaccagaacaacagcgccaccacaacaatggctgtgaccacggtgatgccctgcgaggtcttgattgctagaccctcatcaagaccggtcatctgcttgaaggtgcgggccttgatgatgaaccgctcgccatcaccaaaccgctgatcgccgggaccgatgataaagcgcacaagcccgttcatcatgaacatcacgccaagcgagaccatcacaaagaccacgggctttgctttttgctcgcggtagaatttgaacacggccttgtcggtgatcagaaccaaccccatggtcatcacgatcccgattggcaacgccagaagcgcggttggcagcgggcctgcggagatgccccaggactggaacagccaagtaaacaggatcacgaccatggtcccaaaggccatggtgtccccatgggcaaagttcgaaaagcgcaagatcccgtagatcagcgtcaccccaagtgcgccaagcgccagttggctgccataggcgatgccggggatcagaacaaagtttgaaagcgccacgaaggcattgaggaaatccatctcttagcctcccaggaaagatttgcgtacttcgggatcggccagcagttcctgaccggtgcccgtataggcgttcgcgccttgaacgaggacatagcctttgtccgcgatttcaagcgcttgcttggcgttttgttccaccatcaggatcggcagcccggtgcgggaaacctcgatgatgcggtcaaacagctcgtccatcacgatgggcgacacgccagcggtcggctcatccagcatcagaaccttgggcttggtcatcaatgcgcggcccacggccacctgctgacgctgaccgcccgacaattccccggccgcctgatggcgtttgtccttcaggatcggaaacaagtgatagacctgctccatggtgtcggaataatcatcggtgcggataaaggcgcccatctcgaggttttcctcgaccgtcatcgaggtgaagatattgctcgtttgcggcacaaaacccatgcccttgatcacgcgctcttgcgggctgaggctggtaatgtcttctccgcccagacgtaccgcgccggagcgcacgttcagcataccaaagacggctttcatggcggtggattttcccgcgccattggggcccacgatcacggcgatttcgcccgggttcacggcgatggtgcaatcatgcaggatgtccggccccttgccatagccacccgtcatgctgtcgccaatcaaaaagggttcgctcatgcgtcagccccttgcagtttatctttatttttcaggcccgtgccgagataagcttcgatgacttgctcattcgccttgatctcatcgagggtaccctcggccagtttcttgccctcggccatgacgatcaccggatcacacaggcggccgatgaactccatgtcgtgttcgatcaccacgaaggtatagccacgttcctcgttgaggcgtttgatggcatcggcaatcgtataaaggagggtacggttcacaccggcgcccacctcgtcgaggaagacgatcttggcatcgaccatcatggtgcgccccagctccaggagcttcttctggccgccagaaatctcgccggccttgagatcggcgatatggctgatggtgaggaactccagcacctcatctgctttggcgcgcagggcgcgctcttcatcggcgatgcgcttgcggccaaaccaggtgttccacagcgtctcacccgattggttgcccggaaccatcatcaggttctcgcggcaggtcatcgaggagaactcatgcgcgatctggaaggtgcgcagcagacctttgtggaacaattcatgtggcggcagggcggtaatatcctctccatccatcaggacgcggcctgacgtcggaggaagaacccctgccacaacgttgaaaagcgtggtctttccggcaccgtttggtccgatcaaacccgtaatcgagccctttgcgatttcgagcgaggcgccgtcaaccgcgtggaacccgccgaagtgcttatgcaaatcctcgacgacgatcatgtcatgtttacccctgccgatctctttgtcggcccttttatttggaacagcccggggcgcaatggctcccgggctgatcagatgcgatgtgcaacagtggtccgccttagcggaatttcacggtcacgttcttgccgtcctgaacttcgatctcacggaaagagcctgcgctctcgccggggccgatcaggttgacgccggttgcgccctcatagtcgatctcaccgccattggcgagaatttcgagcgctttgccgagctcaccggggttgattttctcacccggagcattggcgacttcggtgatcttggcgacgtaatccttgggatcaacagagcccgatgcctgcatcgcgagcaggaaaagcgctgccgcatcataggattccggcgaataggcagaagtaccgtcaaagccaagctcggaggctttggcagcgaacatctcggcaccttcactgtcagagccggcgatctgcccgaaggagccattgaggtccgggcccacgttgttgggcagcgaatcgccgatcatcccgtccggcagaccaaaggtgtcgaacgcaccggtgtcgagcgcgccctggatgatgcccagaccaccctggtcgagatagcccgcaacaaccagaatatcgccaccggctgatgccagcgccgcaacctcggcagagtagtcacccttgccgtcttcatgcgcggtcacgatggtgacttcaccgcctgcggcctcgaatgcggatttgatcgaatccgacagacccttgccgtaatcgttgttggtataggtgatggcgatgctgtcgacgccacgatctgcaaggatcgacgccatgatctcgccctgacgtgcgtcagacggggtggtccggaagaacaggccgttgtcttccatcgaggtcagacccggcgagcttgcggagggagaaatcatcaccatgccgttcgggatcgcgacgttctgcaggatcgcgccggtcacgccggaacagtcaccacccacgatgccgttggcgccatctgcgatcagcttttctgcgttcgcagtcgcaagaccattgtcgatacagccggtgtccgcgcgcatcggggtcacttttgcaccgccaaagagtttgccggactcggtgacttcggacatcgcgagttcagcaccagaggccatggtcggcgccagggattcgatcgggccggtgaagccaaacaggacacccagctttacttcgtcggggtggccgtggccgtctgcaaacgcggtgccagcgctcaatgcgatggctgccgtcgcggtcagcagttttttcatttgaattctccctaattggaacaatgttgttcgacacgaaccctatgcaagccccgcaagaaagggaagagcgatcggacaggctttttgttacgtcacaatgtctgcgctaacatcccactgtcaaaggagaaagctgatgctacgcccgctcgccgtgatcgccagtttgatgtttagtgccgcgatggccgtgccctcgctggcgcagcaaatggactcaagccaaggcacgctccgcgttgaaaaaatggccgatgggtttgatgttccttggggttttacgtttttgcccggacgcgcactgctggtcacggagcgctccggacagctttggtatctgaacggcgcgcgacgccaacaggtcgatggcgtccctgagatcgctgcggacgggcagggtggccttctggacgttgttgccgcgcgggatttcgttcagagccgcaccgtatatctcacgtttgcccgtccgcaggggcgcggcgcggggaccgctgtggcacgggctgaactctctgaagacggcagccgattcgactcgcttgaggtgatttttgaagccacgccaggcgcgcggggcgggcggcactttggctcgcggctggtcgaagcccccgacggcagtctttatgtcagcctcggagaacgtggtgaccgtcccagcgcacaggatctgtcacgcgagcagggttcgattattcgcatccttccggatggcagcattccctcggacaatccttttgtaaattctgaggacgcgcgtccggcgatctggtcctacggccaccgcaacccgcagggcatggcgcttgatgcggccggcgacatctgggccgttgaacatggcgcgcgcggcggcgatgagatcaaccggatcacacggggcgccaactatggttggccggtcatttcctacgggcgccactattcggggctgaagatcggcgagggcaccgaaaagccggggctgcaacagccggagtggtattgggatccctccatcgcgccctcgggtatgatgatctactcgggcaagctctggcccaactggcgcggagacatctttgtgggatccctgaaatttgattacatctcaaggctctcgggggcacccctgcaggaggtcgagcagatgaaatcgcccgaaaccgcaagggtgcgcgatatccgcgaagcccccgatggcagcatctggtttgcctcggaatacgagggcgccctctttcggatcaccccgaactgagcaaactcaggtgatgtggcgtacgcccttgctgccacgctctcgatagggcgtggtgtcgtaatgagcgcggtagcatttggagaaatgcgacggcgatgcaaagccacaggccagcgccacattgatgacgctcatatctgtctgcatcaggaggttgcgagccttttgcaggcgcagctccatgtagtaccgcttggggctgcggttgaggtatcggcggaacaaccgctcaagctgacgcgtcgacatgcccacgtcttctgcgaggatcgacgggctgatcggctcttcgatgttcttctccatcatctggatcaccatcgagagtttgggatggcgcacgccgatgcgggtcggaatcgacaggcgctgggtgtcctgatcggtgcggatcgacgaatagatcagctgatccgccaccatattggcaagctcctcgccatggtcgtcggcaatgatcttgagcatgaggtcgatcgacgaggtgccccccgcggtcgacagacgattgccatcgatcacaaagaccgatttggtcagatccacatcttcgaactcttcggcaaaactgtcggaattttcccagtgaatggtcgcgcgcttgccatccagcaaacccgccttggccagggtataagaggccgtacacaagcccgcgatggtcagacccttgcgcgcctcgcgacgcagccaagagagcacccgcttggtggtggctttttgcacctcaatcccaccgcagagcataatggtgtcatcacgttgtaactctgtgaggtcagaatccacctgaaacacggtcccggcagagcaggtaacagtctcgccaccttcgccaacaagggtccaggaatagaggtcgcgacctgccatgcgattggcgatccgcagcgattccatcgcggcggagaagcacaggagggtgaattgatccaacaggacaaacgtaaaccgacgatgtttaccgcccgacgtgagctcgggaatcgcctctggcttggtttgcatggctctggtccttacaaatctggtcttttagacggagctgggaaagccacgcgacacgatggccgcgaattcaaagaccctgctcataggatagcgtcatggtcaagatgtggaaattctaaactggcctctgttagcgctcttatgtatacgcttctttcgtaaatcacggttccaaagttattttcggagtgaaagccatgagcgactggcaaaaaacgaactggcgcagcaagccgcgcgtacagatgcctgactataccgatcaggccgcgctgcaggctgttgaggcgcagctggccaagtatccgcccctggtttttgccggtgaatcccgtcgcctgaaggcgcaactgggtgctgccgggcgcggcgaggccttcttgctgcaaggcggcgactgcgccgagagctttgagcagttcagcgcagacggcatccgcgacaccttcaaggtgatgttgcagatggccatggtgctgacctatggcgccaaggtgccggtggtcaaagtgggccgcatggccggtcaatttgccaaaccccgctcggcgccgaccgagaccgttgatggggtcgaactgccgagctatcgcggtgacatcatcaacgagctggcctttacacccgaagcgcgtattcccgatccgcgcaaaatgctgcaggcctatacccaggcggcggcgacgttgaacctgatccgcgccttctcgaccggcggctatgcggatgtgcatcaggtccacgcctggaccttggggttcaccgaaggcgacaaggccgaagcctatcgggatatggccaatcggatcaccgatacgctcgacttcatgaaagccgccggtgtgaccgccgacaatgctcatacgctgcagacggtggaattctacaccagccatgaaggtctgttgctggagtatgaagaggcgctgacacgtctcgactcgacttccggcaaatggcttgcgggttcgggtcacatgatctggatcggggaccgcacacgccagcccgatggcgcgcatgtggaattctgcagcggggtcttgaacccgatcggtctcaaatgtggtccgaccaccacagctgacgacctcaaggtcctgatgcaaaagctcaatcctgaaaacgaagaaggcaagctgacgctgatcgcccgctttggcgccggcaaagttgcagaccatctgccacgcctcattcaggccgtgaaggacgaaggggccaatgtcacctgggtctgtgatccgatgcatggcaacaccatcaaatccgccagcggctacaagacccgtccgtttgactcggtgctgcgcgaagtgcgtgatttctttggtgtgcatcaggccgaaggaacgatccccggtggcgttcactttgagatgacgggccaggatgtcaccgaatgcaccggcggcgtgcgcgaagtgaccgacgaggacctgagcgatcgctaccacaccgcctgcgatccccgtctcaacgcggatcaatcgctggaactggcgtttcttgtcgcagaagaactgtcgcgcctgcgcacaccggacgacacgcgcgccgcgatctgagtgatccgtccgcagcatttcaaaaggcccgcagctttgcgggcctttttttatccgggcttttgcaaagtgcctggcagcgcgtgatagtctgggcgcggtatcgtccttgcacgcaaaaagaacgcccgaaacgcgttctgcgttcgggcgtcaatgcttcaaggtctatgtccagtagcttgaaacttataagaattcttggcgttttcgattcgaattttaataatcagtcccgcgaaaccacaagacgcaggtgcgacgcgcctttcttcagcttgccaccacgcggcgggcgcgaaacaagtttttcgacatcggtggtggagacggtctccagcgtcacaggaccctcggggcgcgcatcggcccgggcaggcgtgcgggcagatttcaaagcgtcgcggttttcgcggcgggcccgatccagaagcgagcgggcctcatccatcaggctcggggatttgcgttcaaatcccgtgcgcggctcgctgaaaccaccggtactcaccggtttgttcgtgagatcgcgctgcgattggccctgcatctggggttcggacacgcggggtgcggccttgaactcgggcgcagttttggactcgctggccttggtgatcttgcgaatgtcgcagctgtcgacgaggaagcgttgcgacacgcggcttgctgccccttcagagaccatgacgcccagcgcccggctcacatcgccgagatcactgcgcagcggcagcaggatcatctttgcggtgcggctgccgcgcagacgggtggcctgggtgtgcagttcaaattccagaatggaggggtcgtcgaacatgtgctcgagcgcggcgctcacggtcttgcgggactcggcggtgaaaaacgcagtcagaggcataccgcgcacttccatccccgcaagctcgttgaccttttgcccggcaaggcggaatcgcgcgatgcccggtgcaacacgctccagaatgaaggtctgactcaggatgttttcaagaccgcgcgggtcgacctgcgagcggctgggaatgtcatccccgcgacgcagtgcggtccaataggcctcggcctgacgcagaggcgacacgttcgaacgtgtgcgaaagcgatccatagctaccactttatccaaccctgtctttttatctgtgtcgtcttgaccgcgaaacatcattctcttgtcctctgcatccggttccagcatcgaaacttggcaggaggcccatgctcaagtgttaacgccatagtggttaccttgaagttaacatgacacaatctgactaaagtttggaccaatagtttaatcaatggttaacactttggtataggtccgctctgcctatgtgcaaggcactatccgccggaccattgaccccggaccctgccactgtattcaggatgcaggaggatcacagatggttttgcattcgatgacaggctttgcctcagggcagggcggtgagggtgccttggcttggatctgggacatcagatcggtgaacgccaaggggctggatgtgcgtgtgcgcgtgcctgactggctcgaaggtcttgaaaatgaaattaaaaaacgcgcaaccaaaagcctaggtcgtggcaatgtcacgatcggactgcggctgagccgtgccgacgatggcaaaggcgagctacagatcaatgctgctgcgatgacggctgcactggcggcgatccagcagacacaggctgccgccaccgaagcgggcctggacctcacaccggtgcgagcgacggatatccttcagatacgtggcgtgctcgaacaggtcagtcacgaagccaaaaccgaagacctcgtgacccagctgctatccgaattcgactcacttttggccgacttcattaacatgcgttctaatgaaggggcggctctggaggtggttttgagcgcacaacttgaacggatcgaatccctgagccaggaggccgcccagcgcgccgcagcgcgcgaccccctcataaaggaggcgcttcgcgcaaatcttgcccgtgtgctggaccaaagcgacggcgcagatcccgaccgcgtggcgcaggagctcgccatgatcgcggtcaaagcagatgttaccgaagaactcgaccgcctgaaggcgcatattgccgccgcacgcaaactgctcgggcaggggggattggtggggcgaaagctcgacttcctgatgcaagagttcaaccgggaggccaacacgctctgttcaaaggcgcagaacgcggccttgaccgaagtgggtttggaactcaaaaccgtgatcgaccagatgcgcgagcaggttcagaacatagaataaggagaactccctaacatggcacattcaaaagcgcagcgacggggtcttctcatcatcctgtcctccccctccggtgcaggcaaatccaccctcgccaagcggctgcgggcctgggacagcgacatcagcttttcggtctcggccacgacgcgcaagccccgcccgggcgaggtcgatgggcaggactatcattttgtcacggtcgagtcgttcaaacaggacgtggccaatggcgatatgctcgaacacgcccatgtgttcgggaatttctacggctctccgaaggggccggttcagacagccatcaacgaaggccgcgatgtgctctttgacatcgactggcagggcgcgcagcagatcaccaattcggatctcggcaaacacacgctgtcgatctttttgttgccgccctccattaccgagctgcgccgccgcctcgaaagccgtggtcaggacgacgcggaaaccatcagccgtcgcatgcaaaagagctgggacgagatctcgcactgggggtcctatgatcatgtgctgatcaacgaggatctcgatgagaccgaagaagccttgaagacgatcatcaccgccacccgcctgcgccgcattcaacagccgtcgctcatcgaacacgcacgcgccctgcagcaggaatttgaggacctgtcatgaccctctacgccctaggagaagaccgcccccagatccatgccgacacatgggtcgcgcctgacgcaaatctcattggcaaagtggtgctggaagagggggcctcggtctggtttggcgtcaccatccgcgccgatcacgaggaaatccgcgttggtcgtggcaccaatgtgcaggaaaacgtggtgatgcatattgatgcgggctacccgctcaccattggcgcgaactgcaccatcggccataaggtcatgctgcatggctgtaccatcggcgacaactccctgatcgggatgggggctaccatcctgaatggcgccaagatcggtaaaaactgcctgatcggggcgggcgccctgatcaccgagaataaggagatccctgataattctctggtgatgggcgcccccggcaaagtggtgcgcgaggtggacgatgcgcttgtcgccaagctcaccgcaagcgccattcactaccaggacaacatgcgccgttttaagaaagacctgaaggaaatttgaccgtgaagaattctcgcccctccgtaatgcgtccccatggcctgccggacagcgccagccacccggttgtcactccgctgagcccctcggtcgtttacgcgtctgaaaccccggatgcgctggatgatcaatatgagggccgcgtccatggctatacctactcgcgcgagggacacccaaacgcggatgtgatcgcgcggcggctcgacgacatggaaggggcgtcgggcggcgttgtctgtggctccggcatggcggcggtctcagcggtgctgctggggctgttgcaaaccggtgatcatgtcatcggcggcgatcagctctacgggcgctcgctgcgcctgatgaaagaagacctgccacggctggggatcgcaacaaccctcgccaaccccggtgacgttgcggcgatccgcgcggcaatccgccccgagaccaagctcattctggtcgaagccgtttccaatccgacactggcggtggccgacatcgatggccttgcagcgctctgccgcgagcacggtattttgctggccgtcgacaataccttcaccacgccgcgcgcgttcaaaccctttgagcatggtgcggacatcgtgatccattcggtgacaaagctgctcgcgggccactctgatgtgatgcttgggtatgtggtcgccaaagatccggcgctcaatgaccggatgcgcgtgttctccgtgaccaccggcatgacgccaagcccctttgactgctggttggcggagcgggggctgttgtcctttgatctgcgctttgaccgcgccgaggcgacggctgcacggcttgcggatcacatcgcaaccctgccgggcatcaaacgcgtgatctaccccacgcgcaaggatcatcccgatcatgcgcgcgcagaggcgctcctgaaggggcggggctgcaatatggtgagctttgagcttgatggcggacgagaagcggccaatgcctttacccgcgcagcagaaggcctgtcctttgcgccgaccttgggcgatgtgggcacgacgctctcgcatccggcatcctcatcgcatcgggcgcttacggctgaaaaccgggcagaactcggcctgcacgagggtttctttcgcgtgtccgtagggctggaggatccagaggcgctctgcgcgatcttcgagaacgccatcacctctgccatgtcctagttacaattgaaccctaagaaggccgccacgacgcaatgacgaggcataaaatcatgtcgcaagagctgatcgacgggcttctggccgcgtttccgatgccggctgttttgatcgatcagacagagcggttgattgcggccaatgtggagggggcgaccctgcttggcccgcaagtcatcgggcgtcattttgcaacgatcttgcgtcagcccaatgtgaccactgcgatcgaggcctgtcttctggaccgcaaaccgcgcaccgcgcgccatctttccaatgatggcgcgcaggacaccacctttgaagtgaccctgcgatatgtgccgggagtaggagccgtgaatggcggcgcggtgctcttgtgttttgacgacatcaccgaccgcgagcaggccagccagatgcggcgtgattttgtcgccaatgtcagccacgagctgcgcacgccactgaccgcattgatggggttcatcgagaccctgcggggtgctgcgcgcaatgatgcggcggcgcgggatcgtttcctggaaatcatggaaggcgaggcgagccggatgaatcgccttgtgggggatctgctgtcgctcaaccgtgtcgagagcgaggaacgcgtacgcccgaaggaacgtatcgacctcttggcgcatcttcagtccacgatcaaatcgctggcgcccctcgccgagagcggcggcacccagcttacgcttgatgcgcccgcaggcgcagtggagatccctgcggatccggatcagctccagcaggttttcaccaacctcatagagaatgcgctgaaatatggtggggacaatgtgaccgtctccctgatggcgctggagcgggatcccgcgctcagatgtccggcggtgcgggtgcaggtgatcgatgatggccctggcattgatccggttcacctgccgcgcctgaccgaacgattctatcgcgccgacaatcaccgctcccgcgagttggggggcacgggccttggactcgcgattgtaaaacacatcatcaaccgccaccgcggacgcctgcgcgtcgagagcgaccttggcaaaggcgcgaccttcaccgtgatcttgccccaataggtcccgcgtccttctcttcgttgagacggctttcacgtgcaatcctgcgcgcgaaccattggtactggcgcgttttgtgacacaggattcatactttctgccacgccatccccggcaaaccggccgttgcaccaagttcacaggtctcttttccaagtgtttcggatttttttcacctcaggcccgctgttgtcatacagctgttacatagctgtcacaaaagccacacctgagccttctaggaggggcgcaagatcatcttgggggtgatcgtaaacttcttaaactcatggagacttcaatgtcctttgtgaaactgaccgcatccactctcgccatcgcagccgtatcggccaccgcagcttctgcgcgtgagcaggtgcaggtcgcaggttcttccaccgttctgccctatgcttcgatcgttgccgaagcctttggcgaaaacttcgacttcccgacaccggttgtcgaatccggtggatcctccgccggcctcaagcgtttctgcgaaggcgttggcgaaaacaccatcgacattgcaaacgcctcccgcgcgatcaaagaaaaagagatcaaggcctgtgccgaagccggcgtgaccgacatcatcgaagtccgcatcggttatgatggcatcgtgtttgcctccgacatcgacggcaacggttttgaattcaccccgaccgattggttcctcgcgctctccgacaaagttgttgttgacggcgcgctggtcgacaacccgaacaagacctgggccgatgtaaacgccgccttcccggcacagcccatccaggccttcatccccggcaccaagcacggcacccgcgaagtctttgaagacaaagtgatcctcgctggctgtgaagaaaccggcgcgttcgatctgctgaaagaagccaacggtggcgacaagaaagcagccgaaaaagcctgtatcgctctgcgcaccgacggcgtgtccgtggacatcgacggcgactacaccgagaccctcgcacgtatcgactccaacaaggacggtatcggcgtgttcggtctggccttctacgagaacaacaccgacaagctgcaggttgcaaccatgtccggcgttgttccctccaccgaatccatcgcaaccggcgaatatccggtgtcccgcccgctgtacttctacgtgaagaaagcgcacatcggcgtaatccccggcctcaaggaattcgctgagttcttcgttgcagatgaagttgctggccccgacggcccgctggccgaatacggcctcgtagcagaccccgagcttgcaaagactcaggaagctgttgcagcagaagcaaccatgggcggcaactcctaatagccccgcgcatgtaaagttcaggccggggcggatatgacgtcccggcctttcgtttcaaaagtatcgctgttttcctcccttcttgcaccgccaaacggagctcttgatgcctaccctatggcttatcctcggcttgatcgccctctcggtcgccgggttcttcctcggccgcaatcgggccttggtttccgcggatggaaaccccaaggatctacactcgctgccctcttattatgggcataacgtggcactgtcggctttggtgccggcgcttgtccttcttgccgtctggctcttggcgcagcccatgatcatcgacaaacgggtttccggcatgatccccgacgcggcgatctccgaaggctcgaccctgagcctcgtcatgagcgacgtgcgccgcgtggccgaggggctcgacattgccgtggcccagggggccatgacgcaggcacagtcagatgacctcagcagcggcaccaccgacgtacgcgccgttctgggcgatgttggcgtcgccttgggatcggacgtgcgtcccgaggtgctgagcgccgcgcaaacctatcgcgcgctttccagcaccggccatttgtccatgtgggtcagcgttgttctggtggctctgggcggctttggctggtcctacgggcgcacgcacaaggattttcgcgcccgcaacgtggtcgagcagggcatcatggcattgctgatccttgcggcatcgctcgcgatcctcaccaccatcggtattgtcctttcgatgctgtttgagacacgcaacttctttgcgctgcattcctggaccgatttcttctttggcgacacctgggctccgaactttcgcggtgattccgatctgtcgatcctgccgcttctgtggggcacactctatatctcctttattgcgctcatggttgcagtgccgatcggtttgtttgccgcgatctacctcagcgaatatgccagcaagaccacccgttcctttgccaagcctctgcttgagatcctcgccgggatcccgaccatcgtttatggcctctttgcgcttttgaccgtgggaccggcgcttgtgcgtttctttggccagggcgaaaacggcgtcctgggagtggagtggatgagcggcgcgacctcggttctgaccgcaggcgtcgtgatggggatcatgctcattccttttgtctcctcgctctctgatgacatcatcaacgcggtgccacaggcgatgcgcgatggctcgcttggtcttggcgccacaaagtccgagaccgtgcgtcaggtggtcatgcccgcagccttgcccggcatcgtcggcgcgatcctgctggcagcctcccgcgcgatcggcgagaccatgatcgtggtgatgggcgcaggcgcgattgcgaagttctcgctcaacccgcttgattccatgacaacaatcaccacccggatcgtgagccagctgactggcgataccgatttcgccagccccgaaaccctggtcgcttttgcccttggcctgacactcttcgtgctgaccctcgggctcaatgtcctcgcactctacatcgtgcgcagataccgggagcagtatgactgatgaccgatcttagccaaaatccctcctccggagacgcacccatgtcgcgcaaacctggcacctcactgctggaactgtcggatcgcaccaaacgccgcaacgccgccgagacccggttcaaggcctatggcattgccgctatcgcggtcggcctgttgatgcttgttgttctggtgacaaccatcgtcagcaagggaacaggcgcgtttcagcagacattcatcacgctcccggtcgagctcctggaaagcaagctcgacaagaacggcaaccgcgatattgaagacatcaagaaggtcacgacgtttggatatgcgccgatcattcgcaacgccgtcgaggcgaaagtgaccgatcttggcgttgaaacctcgctcaaggccaaggacatggcggggcttctgtccaagaacgccgccgcaaccctgcgcgaattcgtgatcgccaatccggatcagatcggcaccactgtggagttccgcttcctcgcacagagccgtgtcgacgggtatctgaaggggcgcgtgagccgagacagcatcgagaatgacaagaatatctcggttgaacagctcgatctcgttgacgcgctggtggcggccaatgtgatcgaaaaaaccttcaacctcgacttcattctcggctcggatgcatcggacgcacgccccgaagccgcaggcatgggggtctccatgttggggtcgctcttcatgatgttcgtggtgctggcgcttgcactgccgatcggagttgcggcttcgatctatcttgaggagtttgcgccgcagaactggattaccgacatcatcgaggtgaacatctccaacctcgcggcggtaccctcgattgtctttggtattctggggcttgcggtctttatcaactacatgcacctgccgacctcggcgccgcttgtgggcggtctggtgctcacgctgatgacactgccgaccatcatcatctcgacccgcgcgtcgcttaaggccgtaccgccttcgatccgcgatgccgcattgggcgtgggcgcctccaagatgcaggccgtgtttcaccatgttctgccgctcgccgcaccggggatcctcaccgggaccatcatcggtctggcacaagcactgggtgaaaccgcgccgcttctgctgatcggcatggtgggctttatcgcctccaacgcccccgacagcattgcctccggtctcttgtcgccgaactccgccatgcccgcacagatctatgagtgggccaaacgcgccgatccagcgttttacgaacgcgcctggggcggtatcatcatcctgctggtcttcttgatcaccatgaacacattggccgttatcttgcgccgccgatttgaacgccgctggtaaaggggccctacaatgaacgatatgacagcaatggacagcaccgtggaaacacaacgcaccaagatcgcagccaagggcgtcaacgtctattacggcgacagccacgccatcaaggacgtgaacgtcgagatcgaggacaagaccgtgaccgccttcatcggtccgtcgggctgcggaaaatcgacctttctgcgctgcctcaaccggatgaacgacacgatcgacatctgccgcgtcaccggggacatcctgcttgagggcgaggatatctacgacaaacgcgtcgacccggtccagctgcgcgcgcaggttgggatggtgtttcagaaacccaacccgttccccaagtcgatctatgacaatgtcgcatatggtccccgcattcatggcctggccaagaacaaagcggaactcgatgaaattgttgagaaatctctgcgtcgcggagcgatctgggacgaggtcaaagaccggcttcacgcgccgggcaccgggctctccggtggccagcagcagcgcctctgtattgcccgtgcggtcgccacagagcccgaggttctgctgatggacgaaccgtgctccgcactggatccgatcgcaactgcacaggtagaagaactgatcgacgagctgcgcgaaaactattcggttgtgatcgtgacacactccatgcagcaggctgcacgcgtgagccaaaagaccgcgtttttccacctcggaaacctcgtggagttcggcccaaccggtcagatctttaccaatcccgaagatccgcgcaccgaaagctacatcactggccgcatcggctaagttggagacatatcaaatggttgaacaacatattgcatctgcattcgaccgcgacctggaggccattcaggcccggatcatgaagatgggcgggcttgtcgaggccgccatcatggaaggcgcgcgcgcgcttgaaacacgcgacgaagagctggccgcaaaagtggtgcaggacgacaaagccatcgacggactcgaagagctgatcaatgaggatgccgcccgcgtgatcgccatccgcgcaccggccgccgttgatctgcgcgtcgtgctcagcgtcatcaagatctcgggccacctggagcgggttggcgactatgccaagaacatggcgaaacgaaccagcgttctggcccagagcccatcagtggccgacagtgcagcagccttgcggcgcatggcgcgtgaggtggagttgatgctccgggacgcgctcgacagctatattcagcgagatgatgagctggcgcgcgacgtgatccagcgcgaccgcgacgtggaccagatgtacaacgctctgtttcgggagttcctcacgcatatgatggaagacccgcgcaacatttcgtcctgtatgcacctgcactttattgcaaaaaacatcgaacgcatgggcgatcatgtcaccgcgatcgcagagcaggtggtctatctcgtgaccggcaacaagcccgaggaagaacgcacaaaagccgacaatacgtcggtgaccatgcaggagatctaagccatggcagtcgatcagcctactgttctggtcgtcgaggacgaactggcgcagcgcgaagtgcttgcttacaatctggaggcggacggctttcgggtgatcaaggcggagaacggtgaagaggcgctgctgctcgtcgaagaggacatgcctgacatcatcgtactcgactggatgatgcccaatctgaccggaatcgagatctgccgccgcctgaagacgcgcacggacacccggagcattccgatcatcatgctctccgcgcgctcggaagaggtcgacaaggtgcgcggtctggagaccggcgcggacgactatgtggtgaaaccttactccgtgatcgagctgatggcccgggtgcgcacgcaactgcgccgcgtccggccagccaccgttggcatgcggctcgagtttgacgacattatccttgacgcggaaacgcacaaggtgagccgctcggaacatccgctcaagcttggcccgaccgagtttcgcctgctctcgacctttatggagaagccgggccgtgtctggagccgtgaacagctgctggatcgcgtctgggggcgggatatctatgtcgacacccgcaccgtcgatgttcacatcggccgtctgcgcaaggcactgacccagcatgggggcgatgatcccgtccgtacggtgcgcggtgcgggctatgcgctcgggtagccgaccacattagatttgtactgtaacgatttattgcggctccggttttccggagccgtttttccatcaaacagtgggcttagcgcggcaagggatcttcgggctgtgcctgttcggctagccagtcacgaaatttctgaaggccgctgtggcgagacttgctggtcggccagaccagataatacgcgccgccaatgtcttcgggcacgggatgcaatgacaccagccgccctgtcgcgaggtcctgttccacgagataatccggcatcaaggccacccccaaaccatgcagcgcagcctgattgatggtcgagaactggtcatacatgctaccaccgagcgtgcccgaagtcggaacttgctgccgttgaaaccaatccgcccaagcggtcggccgggtttgaatatgcaaaagcggtagggcgaggatatcgcccggtgcatcaaccttggcgcgtttgacaagctccggcgcacagaccggcaaaagctgctcgtgcttgagcagcagagaatccgtccccggccagtctgcatgtccaaaatgaagtgcggcatcaaagctttgcgttgcaaagttaaaaggcgacaaccgggtggacatattgattgtcacatccggatgtcgccgtgagaacgccggcaaacgaggcatcagccagcgcatgccaaaggcgggcaaaatggcgaggttcaggcttccggccaatggaacggattgcacctgcagggttgcctgcgcaatccggtcgagcgcatggcgtacctcctgggcatagtccgtcgcatctggcgtcaaagagagcgcctttccatcgcgcaggacaagctcaatgccaagctgccgctccagcgcctgcaactggcgactcacagccccttgcgtcaaggagagctctaccgcagccgcagaagcgctcccgaggcggtcaaccgcctccagcgcgcggagggacgcaatcgaaggaagaaatctgcgaggtaccgacatgtatgattttttgtcatacattctttccaaagtctcgctgttttttgcggccagccgcgcttaagctctcgtcaacactttgattggaggcccacatgctggatgacaaacccacacttcgcgcaaaagatgcacctgaccttggccgctttgcttgggacgacccgctgcgcctgagcgatcagctgaccgaagacgaacgcatgattgaagcctctgcacgcgcttacgcacaggaaaaactgcaaagccgtgtgactgaggcctatgagaccgaacagaccgatcccgagattttccgcgaaatgggcgaaatggggcttctgggcaccacgatcccagaggaatacggcggcctcggtggcggttatgtctcctacggcctggtggcacgcgaagtggaacgtgtcgacagcggctatcgctccatgatgtcggtgcaaagctcgctggtgatgtacccgatctacgcttatggcagcgaggagcagcgccagaaatatctgccgaaactcgcctccggtgagtggatcggttgttttggtttgaccgaacccgatgcgggctcagatccggccggcatgaaaacacgcgccgaaaagaccgcagatggctatcgcctcacgggctccaaaatgtggatttcgaacgcgcccatcgccgatgtctttgtggtttgggcaaaatccgaagcccacggcggcaagatccgcggatttgtgctcgataagggcaccaagggcctgtcggctccgaaaattcaacagaagatgtcactgcgcgcttcgatcacgggtgagatcgtcctggatggggtcgaggttggcgaagaggcgctgctgccacatgtcgaaggactgaagggaccctttggctgtttgaaccgcgcgcgttacgggatcagctggggtgtcatgggggcggcggaagcctgctggcatgcggcgcgccagtatggcctcgaccgccatcagtttgggcgccctctggcgaacacgcagctcttccagttgaaactggccaatatgcaaaccgagatcgcgttgggcctgcaagcctccttgcgtgttgggcgtctcatggatgaggccaatgccgcgccggagatgatctccatcgtaaagcgcaacaactgcggcaaggctctcgaaattgcacggcatgcgcgtgacatgcacggcggcaacggcatcagccttgagttccaggtcattcgtcacatgatgaaccttgagaccgtgaacacctacgaaggcacgcatgacgtccatgccctgatccttgggcgcgcgcagaccggcctgcaggcgttcttctaagccttaacgaggctcaaaaacgcaaagccgcccttgcaggaatgcaagggcggctattttgcggggattccgcgacgcaaggggcgccaacactcacgggatcggtgagcagctcgcgacaaaccttaaggcgcggattaacacaggaagcaaaaccgcttaggccagcggctctgcgattaagaggtatgaatcgatcccaagttgctttgcacatgaatcatcccaatgcatcatcttggcgtagtgcagggacatttttgcagacctccttcacatgtgcgcccatcagaaaggcaggggtatccgcgcaaaacctctgaacgaacagtgctaaggcgtgcccttccagaggttaatgcgctttgcggtatctcatccaagcacccccaatctggtggggtttggggtgcgtttttgcaaaattacccctagaaccgctgtgtcgcgccctgttttagccaatgtcgcgcatccggaggccttcaggatcgaacaccggcccaatctgaacccgcgctgtcgcccgacgccctgcaatattgacctctacctcatggccggtttccaatcccgctttgcaaaaagccaaagcgaccgggcgcccgatgcggtagccaaaggcacaggaggtcgtatgcccgatgatgtcaccgcgcgcactgaccggctcatgccccagcggcaccacatccacctcctcgaacaggagcgaaacgatttgatggttgaggctttttttcttcatctcttcaagcgcttgagcaccgataaagccaccactcttgcgtagggcgaaaccaaggccgacctcaagcgggcttacatcgctgtccaattcatgccccatcgcgcagaaccctttctcgatgcgcatggaggtctgcgcatagagcccggccggggtcgcacctgcatcaaggagcgcggtgtagacctcttgcgcggatgtagtcttgcaggtgatttcccaaccagcctcgccaacataagagagccgggccgcgcgcacaggatgccccgcgatcatcgcttcgccatgtttgaaatagccaagtgaggccagctctgcggcgccaagatcgcgcgcaatgcgcatagcctctggccccatcaaaccaaaggtggcgaaatcttctgttgtatcacatatctttacgtcgaactcgcggctgtgccgcagaagccaggccatgtctcgcttgatggccgctgtgccgacaaacaaacggtaatgatctgtcgcaagtcggtgcaccgtgatgtcagattcaaaccgcccatgttcgttcagcatggcggtatagatgacggatccgggcgcgcgcgccatgtgacccgaacaaacatgcaaaagaaacgcctcagaatccggtcctgtcacgtcaattttgccaaaggaagaggcatcaaacacggcagcacgggtgtgtgcggccttgacctcattggcgacattggagaaccagtccggccgttcgaacctcagccttggttccgcggtccttccgaaataaagcgggcgttcccacccgtagacctgaccaaaatgcgcagcggacgagacatgcgccgcgtgaacgggcagggggcgcagattgcgcgcagtagacaattgtcggtccgggtatgcaatttcgtaatgggtgccgaggatctcgggcgcgcgcgccatcaggtgatccaatgaattgaagaccggcgcaaagcgctttgcgtccgcttcagagagatcataggctggcgcgccatgcaggattgcatgcgcaaggttcatgcccgcgccacctcccgacgcgatccccaccgaattcatcccacaccccaagaacaacccacgcgtctcggcggtttcaccgagcataaacgtgccatcgggcgtgaaactctcggggccgttaagcagcattttgacctctgccgtttccaatgcgggcaaacggtgcagcgcgttcagcatcatcggctcaaaatggtcccaatcctcggggagcaggccaaattcaaagctttcatcaagacgcccgggcgcgattgctttgcccatgggttcaaaacaacccaccagcagcccgccggaatcgtctcgaatatacagatggttgtcgtgatccgagagggtcggcgtgttgccctggattccgtcaatcggcttggtcagcaggtagaaatgctcgcaggcaagggcagggacctcggccccggccatggcaccgatctcacgcgaccacagccccgcacatagggcaatcgcatcgcacatgacgacaccgcggctcgtttcgactcctttgacgcggccattctccgtcagaattcccgtcacaccagtttgttcaaagagacgcgcacccagggattttgcgcccttgaccaatgcggcacagacgtccgaaggcgagacccggccatcatcgggcgaccacactgcgccaagcacatcatccgcgttcatcagcggccagcgttctttggcctcctgcggtgaaatcgatgtcgcttcaataccataggcatgtgcaagcgcctcctgccgctggatatgaaccagccggtcaggattggtggccagcgacagggagcctttttgaatccagccaacactctgcccggtttcacgctcgagctggctgtagagctccaccgagtattggatcattcgggtgaggttgcgcgaatggcgcagcgcccgcacctgagccgcagagtgccaggtggtgccagaggtcagctggttgcgttcgagcaggatcgcgtcgtgcgctcccatctttgcgaggtgatagagtgtcgaacaccccatgatgccgccgccgatgacgactacggaggcgtgtgcgggaaggtctttgggcatggtgtcattccattttgggcggaatcaggatcagtgtcccggcgaaccgggcgtgcaaaaaagccttgatgaaatcacgaaacccgtcaatgtgagcaaaaaataacgttcgttataatcgcaacaggagagaaaacgggtgagagtatggacccaaccctcagaaataaaacgataacacgcctcaaagaggagctttcggacctgtcaccgcgcctccaggtggccgcaaaatacatcgtggatcacccggccgactttgggctcgactcgatccgcgacacggcacgcaaggccgaggtttcgacctataccctggtgcggatctccgaacggctcggctttgacagctacgaggacatgcgggatccgtttcgtgtcgcgctggtggccccaacacagtttgtcgatgcgcctgaatggatcaaccgatggcgcgaaagtggagaacttggccagaaacaggccgaagcggcgctgaattcgatggcgattgtccaacgcagcttggaggggcagaatctaaggcaattgcagcgggtggccgagatgctccttggtgccaagaatgtctatctgaccgctgtgcgcgcaagctattcgattgcctactattttcattacgtcggccgcatggcgctgccgtcgctgcaactgattcctcgccatatcaacagcgccattgatgagttgaactatgccgacgaaggcgacgtgatgatcgcgatcacgctcacgccttattcgcgcgagaccatcgaagcctgtgaatttgcacgtaaaaagggggtcaaactggtcatgatctccgatagtgaggtgatttcttcaaaattcacccctgaagaaactcttgttgcgtctacattgagcacacatcactttgggtgttacacgggggttatggcggtggccgaaaatcttgtgtcattgctggtggctttgggcggtcaggacgtgaaggacagaatcacgtcttatgagaccctgcgcaaggacaacaacgcctactgggtggcgaagaaaaaacattagttatgtcgtgactgcaaaaataacttgtggaagcatcgcgcgcatactatcggcaccgcgaccgattttaggttttaaatcagggagagtacttatggtcctcaagcacacacttcttgcatctgctgcaactgttgcgctcggctttgccggggcggcgtccgcggctgaacagcagttcatcaccatcggcaccggtggcgtgaccggcgtttactaccctacgggtggcgcgatctgccgtctggtgaacaaagaccgcaaagagcacggcattcgctgctccgtggaatccaccggtggttccgtttacaacacccgcaccatccgtgaaggcgagctggagttcggcgttgtccagtccgacgttcagaaggctggtctcgacggcaccggcgcatttgaagcagacggcccgttcgaaggtctgcgcgctctgttctcggtccacccggagccgatgcacctgatggcgcgcaaggatgcggaaatcgcctccgtcgacgatctgaagggcaagaaagtcaacatcgcgaaccccggctccgggacccgcgttctggccgaaaccctgatgaaatactccggtctgaccaccgatgattttgcgctggcagcagagctgaagtcctccgagcaggccgcggcgctgtgcgacggcaagatcgacgcaaccatctgggcctccggtctgccgaatggttcgagccaggaagcgacctcgtcctgtgacgtgaacatcgttccgctgtccggtgaaaacattgacactctgctggcagagaacacgccgtacgcagccgcaaccatccccggtggcatgtatccgggtaacccggacgacattccgtcctggggccccaaagcaaccttcgtgacctccgctgacgtctccgacgaggtggtctacgctgttgtaagcgcggtcttcgaaaacttcgacgacttcaaaaagctgcatccggctttctcccgtctctccgaagaagagatggtgagcgacgcactgtcggctgaaatccaccccggcgcgatgaagtactacaaagagcgcggctggaagtgatccaatcacttctttcgtgaaatcaaaggctttcgcccctttctttaaggggcgggagccgttttcgtttcaacaagagtgcataacaaaccgggtggggacacgatgacagataaccagagcgcgacggctcaagaagaccgttcgcttgaggattttgtagccgatagcgacactggcggtcgcttgccgcaggatgcgttgggacgtaatgcgctgtggtatctaccacttgtctggtcgctgtatcagctttggatcgcctcaccgctgccctttatcctcggggttggcgtgtggaatgacacccagacccgggccattcaccttggttttgcggtgcttctggccttcatcgcgtttcccggactgaaatcgagccctagacaccacattccgattccaacctggatcattggtgccgttggtgcgctctgtgcctcctatctgttttatgcctactccggcgtcgctgcgcgctctggtgcgcccaaccagaccgatgtgatcgtctccatcgtggggctggtgctgctgctggaggccgcacgccgcagccttggtttcccgttgatgggtgttgcgctgttcttcctcgcctatgtcttttttggctcttcgccatggttgccggaagtggtgcaatggaagggcgcctcgatcaacaaagccatgagccatatgtggctaaccactgagggcgtttttggtgtcgctctgggcgtatcctcgggttttgtgtttctttttgtgctcttcggcgcacttcttaatcaagccggggcagggaactactttctgaaactggcctttgcggccctcgggcacctgcgcggcggccccgccaaagcagctgtgatcggctcggccgccaccggtcttatttcgggttcgtccatcgccaatgtggtcacaaccgggaccttcaccattccgctgatgaagcgcgtgggctttcccgccaccaaggcaggcgcgatcgaagtctcttcgtcaatcaacggcgttctgacgccgcccgtgatgggcgcggtggccttcctgatgaccgagtatgtcggcattccttatgtggaagtggtcaaaactgcgatcatcccggcagcgatttcctatatcgcgctgatctacatcgtgcaccttgaagcgctgaaaatgggcatgaagggctcgagccggatgcatccggtcaagttcttcctcggtgcaatcttcaccatctcgatctcgatcctgatcgggggcggcaccctctggctctgcggtgttctcgtgaacgcgctggagagcattgcaggtggcgcaaccacatggctgatcgtcgtgatcatggcggtgctctatgttctggcgctgaaggtggctgccgcacaagaggatctggagatcagcatcgagtcgatgcaaaacctgcctcccacgcgcgagatctttaaaaccggcattcattatatcatgccgatcctgctgctgatgtatcttctgatgatcgaacggaaatcgccggggctgtcggccttctggtcgtccgtcgcaatgcttgtgatcctcgcgacgcagaacccgatcaaggcgatgttccgaggtcaagacactgcaattgctgatttcaaacaaggcattgcggacatctttgaaggcctgatcatcggtgcgcgcaacatgattggcctggcctgcgccatgggtgttgccgggatcatcgtgggcgccgtgacccttacggggattgggcaggtgatggcggaattcgtagaattcctctcgggtggcagcgtcatgctgatgctgatatttgtcgcgctcatctccattgttctgggcatgggtctgccaacaaccgccaactatatcgtggtgagttcgctgatggccggcgttgtggtcgaacttggcgcgcaaaacggcctgatcgtgccgctggttgctgtccatatgttcgtcttctacttcgggatcatggcggatgtgacgccacccgtgggccttgcaagctttgcagctgcggcaatctccaagggtgatccgctgcgcaccggctttcaggcgtttttctactcgatccgcaccgcgctgttgccgttcctctttatcttcaacacagatcttctgctgattgatgtgggaccgatccaggccatctttgtctttatcgtcgcgatgattgcgatgctgctgtttgcggcctcgacaatgaactatttcatcgtgaaatcaaagatttgggaaagtgtcttgttgctcctggtggcctttaccttgttcaggcccgggttcttcctcgatcagttgcaacccgcctttgaaacccgaccgggctctgcggtctacgagatggccgaagcggtcgaagatggcggaacgctgcgtgtgcgtctggtgggcgaaagccttgaaggcgatatggtcgatgcccgtttcctgttgccgcttggcgaaaagggcgcggatgggcagacccgtctctatgatggcgctgggattgagttccgcgatgaggatggcaagatctacgtcgacaacctgaactttggcggtccggcagagcagcttggcatcgatttcgactgggaactggtcgagatggaggttgaggctgatcgtctgccgaaagaagtcttctatctgccggcgttcttgatccttggtttcgtggtcttcctgcaaatgggccggaagcgcaaagaagaaggagtagcctgatgaccaaacatgtactttgcgccatcgacctgacgcatatggacgcggaagagaccttgctgaagcgcgcagcagagcttgcggaattctacggtgccacgctgagcgtggtgaccgtggtcccggactacggcatgagcattgtgggatcgtttttcaaggacggcaccatgaaagaggcagtcaaagaagcggaccgccaattgcatgcctatgtcaaaaaggtcgtgccggacatgaaggacgtgcagcacatcgttgaagtcggggcaaatgtctacgagatgatcctggatgcgatcaaacgctccgaagcagatctcgtcgtgatgggcgcgcataaacctgagttgatggatcgactacaaggtccaaactcagcacgcgtggcgcgctacgcaccatgttcggtgctgatcgtgcgagactgaaccaacatcaaattcaagaaaacgcgctccaaaccggagcgcgttttttttgtctgttttcatgggctcaagggtgctgatcgacgctggatatgagggcgaatacaaatcccataatcagtattatgtaaaatatgctactatagagcatacactccgattggagccccaccagtcctagccaaaaagctcatgtgcgagttctagcgcctcaatcaacgtatctacctctggacgcgtgttgtacatgccaaagctcgcgcggcaagttgcagagacgccaagatgatccatcaaaggccccgcacaatgatgcccggcacgcaccgcgacacctttcttgtcgagaatggttgaaatgtcatgcgcatgtgccgcgccctcaagggtcagactgaatatcgctgcttttccaggagcatggccctgaatattcaaccagttcaaccccttgaaacgctccgatgcatagtctcgcagatcggcctcatgggcggcaatttctgccattccgatctccatcatatattcgagcgcgacgccgaaaccgatcgtctgcacgatccctggcgtaccagcctcgaacttcatcggcggatcgttgtagatcacctgatccttggacacttctttgatcatatcgccgccgccaataaacggacgcatctcggccatacgctccggcttgatatagatcgcgccggacccagacggaccataaagcttgtgcccggtgacggcatagaaatcacagtcgagatcctgcacatccacgggcatgtgaaccgcgccctgagagccgtcgacaagcactggcacgcctttgtcatgcgcgccttttgtgatggattttacatcaacaacggttcccaagacattggaacactgggtgactgcgatcagcttggtttttggtgtaatggcgtccagaaccttttgcgggtccaggcttccgtccgcgtccgtgtcgatccatttgatgacgacaccttggcgttcgcgcaggaaatgccagggcacgatgttcgcatggtgctccatgacggagaggatgatctcatcgccggcttccatccgcggcatggcccaggaatacgccacgaggttgataccctctgtggttccggaattcagcacgatgtgatcttcgtgacccgcgttcaaaaactttgcgatgatgccgcgtacgctttcgtatttctcagtcgcgagattagaaagataatgcaagccacggtgaacatttgaatattcttccgcgtatgccttggtcacggcatcgatcacaacctgaggtttctgcgcagaggccccgttatcgagatagaccagcggctttccgttcacttcgcgtgacaggatcggaaagtcagagcggattttttcgacatcatacattggacgtctccagaattgtgggcgcaaaaaggcccatcaggatcaaaacagcgatcatcgcaccaagcccggccaacaggatcacgcctgcagatttgccaagcgaagagaggccaaacccttctttagtgaagtgcgccaagacatagagcccatagagcgcagctgcgaagttaaacagaacggccaagggtgcaatgacaaaaaccatcgcaatcgcaataacctgcacaacgatattcacgatgcgcagccagacgagcagtcccagaatggtgccaaattctgcgtctccgcccatccacctcgccgcaaccatcgacgcggcagtgtagctgagctgcagcacgacaaggaacgcgccaaagagtgcggggctcagtcccggaaagagcgcattggagggatcgcccagcaacacgccctgccctgcatagagcagaacgctgagcacaacattcagcgcaaaccccgtccagaccacttcgtcagtaagattgagcgccatgatccggcgcgcagccgaggcaggattaacgatagtttcgaccaataggtctttgaagttcatcagtttttaccccagtaggcctcgatcagaccagagatccagaaccaaaggaaaacagcaagccacaaaagtccaactgaactcagtgcagggctcggcccaataaagcctgccaccagaccattgagcaacagcaatggcgatgacgccagaagtgcccagaacagggcaagccgaccacagtaggcatcgccctgccctccgaccagtcgcaccaccaggtgcgagatcagcgcaagcgcatagagcgccaaaggagcgatgaagatgattcccatcaaggctccgcccagcagcatattcagctcttgcccactcagatgagcctcacgggccaatctcggcatctgtgcaatgaacaacagcacgcaagcgcccattacaaaagccaaaagccggtcttcacgcggccccatagcgagaagccgcgcaatcaccttgcgcggcccccgatatgtcgccgtgatgtctgcggtcacagccatcccggacctcagcgccgccgtgcgagccagccgtaaaggcggtcgttgatgcttgcggcgatctcttcgtcttcgatttcctcaaccgcttcggccaggaacgccagcgtcatcaggtcagtggcctcggcctcaggcacgccacgagaacgcaggtaaaacaaaccatcctcatcaatggcaccggaggtggacccgtgcgaacaggccacgtcgtctgcgtagatctcaagctctggcttggcgaggaactggctgtcgtcatccaagagcaaagactgagaaatctgatatccatcagtcttttgcgcgccttccttcacaaggatcttaccctggaaaacgccggtggcgccgttgcgcaggaccttcttaaagacctggcggctctcacaattgaccgcgtcatgcgtaacaaacacggtgtcatcgtggtgaaaatcaccatcaccaacacaggcaccagccagatgcgccacagcgtcatcaccgaggaattcgaccacggcctcgttgcgcgtcagcacaccgttcaccgtcagcgtaaagctcttgaaaacggactccgtcccaagccgcgcaaagagatgcgttgcggcgcggcgctcgtgatcgcgcccctgggcgcgcaccagatgcagcttgcccgtgtcagcgatgtcgatttccatcgctttgttaaagcgagacgcggctgggccattttcgaggatcgtcgcttcggccccgctgtcgactttgatcacatggtgcaggatcgcatccgagttttcgctcgcgtgctgatagaccaagttgatcggcttggacggcttgccggtgacgtggatgaccacgccatccgtcgcaaaagccgtgttgagcgctgccagaggacgctccaccggggattggccacgcgcttcaagaacaccgtagatgtccttggcccaatggatatctttgcgatctatgtcagccaaacgctcgatgctcacaccctcaagtgcgaggtcatcagaggcctctgcgtcaaacacgccatctacaaaaacgatgcgcagccggtcgaagttgtcgaacatcggcgcctcgccactgtcgaaaacggcagccgcaggcgcgtctgccgcggtcagcgtgtccgggcgggtgtatttccaatactcatcccgacggtccggcagccccatggtctgaacccgggccacggcggcgcgacgcgccgcctcaagacatccaccttcgggcaaggacaacgccgccaggcgtgcctccgtcgttgtttgtttcagctcgggaagtcccattatgccacctcggacaggatgtctgcgtaaccgttgttttcgacctcaagcgccagctcgggaccaccggttttaacgatgcgaccatccgccatgatgtgcaccacatccggtttgatgtgatccagaagacgctggtagtgggtgataacgaggaagccgcggccttcgtcacgcagcgcgttgacgccgtccgcgaccagtttcatcgcgtccacgtcaagaccggagtcggtctcgtcgaggatgcacatcttgggctcaagcatcgccatctgcaggatttcgttgcgcttcttctcaccgccggagaagccgacattgaccgggcgcttcagcatgtcggcgtcgatcttcaactctttggcctgcgcgcgcacgtgcttcaggaagtcggtcgctgagagttcctcttcgccacgcgccttgcgctgcgcattcaccgcagtccgcaggaaggtcatgttgcccacgccggggatctcgaccgggtattggaacgcgaggaacacgccaagcgctgcgcgctcttcgggctctagctccaggagttcttcacccaacagggatgcggagccctcagtgacttcatagccgtccttgccggacagcacataggacagcgtcgatttgcctgagccgttcggccccatgatcgcatgcactttgccagcttcgacggtgaggttcacacctttgaggatttgcttgtcttcatcctcaagtttcacgtgcaggtttttgatttctagcatgtttttcgcctttttctgcttgcagtcagcgctggctgcgcgatctgcagatcgtggtttcgtcagctctccgcatccaactgaagcggcttgatgacgtaattcttgtttcggttatagcgctgtagggtgtcgaacaccccgtagcccatctgttcaatcagggcgtgaaacgctgcatcgttttcccggtcgacctcgacaagcaaggctggccggcatcgtttgatcgtgtcctgcaggccggaaagcaccaggatttccatgccttccacgtcgatcttgatgaaatcgacctgctcatcctgaagcgccagatcccccgtggtgatctcgatatcaccctctccggcaagcatctttgcagccccgagattgcggtctctggcctccatcccaaaccccgcgcgtggcgcatcccccagacctttgcccagatggctgaggtcatatttgggggcgagcccattggcagagatatttgccagcaagagctttagcgcttttgggttcggctcaaaggggatcacgcgcgcagccgacaggaaggctgcggcataaagcccgtgatttccaacattggccccgatgtcgacaaaggtgcccccaagcgggaaaagagacttgattacagagagttcttcctcttcgtaaaagtgcccttcgcgatgggagcgctggatcgggtcgcgctgcatatcgacagaaaacaccatgcggcgcccgtgaatttcgctcgtgtagagcgacacatccgcaaaccccacggattgcccggaagagatccgggcaacaatgtcagggagttttgaagggtcaaacagcacggcgtttcctctttagccgatcacgacagcggtgccgctggcagagaccatgagcatcgattgcccgacaacttcataatcgaggtcgacccccacaaccgcattcgcgccaagcgcacgcgcccggtcttcgagttcgctcaaagccgtctcgcgcgcgtcctgcagcttgctctcataagcgcctgatctaccgccaacaatgtcggtgatctgggcaaatacatcgcgcacaacattggcacccatgattgcctcgcccacgacgatgcctttgtactcggagatctggtagccttcgacgctatttgttgtcgtgacgatcatggaggtcgctccttcgctcgtttgccaggggccggccattagccgaccgagccctcaagggagattgcaacaagctgctgcgcttccatcgcaaattccatcggcagagcctgtaggacgtccttgcagaaaccgttcacgaccagtgcaaccgcttcttcttcgtccataccgcgctggcggcagtagaacagctgatcatcatccaccttggaggttgtcgcctcgtgttcgcagcgcgaggaattgttcttgacctcaatgtaaggcactgtatgcgcgccacatttgtcgccgatcagcaagctgtcgcactgggtataattgcgcgaattcttggcctttgggtgcatcgacaccagaccgcgataggtgttctgcgccttgccggcagagatccctttggacacgatccggctcttggtgtccttgccaaggtggatcatcttggtgcccgtatcggcctgctgcatgttgttggcgatggcgatggaataaaactcgccctggctttcattgccgcgcaaaatgcaggagggatacttccaagtcactgcagagccggtctcaacctgcgtccacatcaccttggagcggtcgccgcggcaatcggcacgtttggtcacgaagttgtagatgcctcccttgccgttctcatcgccggggaaccagttctgcacggtggaatatttcacctcggcatcttcttcgatgatgatctcaaccacggcagcatgcagctgcgcagtgtcacgctgtggtgcagtacaaccttccaagtagctgacatagctgcctttatcggcaatgatcagcgtccgctcaaactgtccggtgttttcggcattgatgcggaaataggtgctaagttccatcgggcagcgcacgcccggcggcacatacacaaaggacccatcagagaacacggccgagttcagtgtggcgtagaagttgtccgacaccgggaccaccgagccgaggtatttcttgaccagctcgggatgctcgcggatggcttcggagatggaacagaagatcacgccagccttcttgagttcgtcctgaaaggtcgtgccgacagacacggagtcaaacaccgcatccacagccaccttgcggccctctgcgggggcatcctctgcgccctcaacacccgcaagaatcatctgctctttcaaggggatgccgagcttttcgtaagtagcaagcagctttggatcgacttcatccagcgacttcggcttcacttccatgctcttgggacgggcgtagtaatactggttctgaaagtcgatttcagggtagttcaccatcgcccagttcggctctttcatgccttcccagcgctcaaaggcctgaagacgccattcggtcatccactcaggctcttcatttttctcggaaatcaggcgcacgatatcctggttcacgcctttgggggcgtattccatctcgatatcggtgtcccagccgtatttatatgtgctgacctcgcgcaccgcatccacggtttcctgatcaacgccttccttggcttcgaattggtccagagcggccatcgtcttctcctgcactcacgccgagcgggcgcgatgtttcttctgtttggcgcaccacgtttctgcaaaccgcagcacatccgtttcggtcgtgtcagccccaagcgatacgcggatcgctccctgagctgtcttctcatcaaatcccatcgcggtcagaaccgcacttgcgcgcaccttgccgctagagcaggcgctccccgcgctgatggcaaaccccgcaaggtccatctgcatcacctgcgtctcgcccttccagccgggggtcgcaaaacacgaggtattgggcaggcggcgcgcctcgttgccaataaaaatagtgcccgggcactgggccgcaaccgccttttctagaatatttctaatttctgcaacccggtcccagacaccgttatcaagatccttcgcggctgcttcagctgcggcgccgaaccctgcgattccaataacattttccgtcccggagcggcgccccatctcctggccgccacccttgatctgcgcggccaaatccgtcccgcgcttcagcacaaccgccccgacacccttgggtccaccgagcttgtgcgccgagatgagcgccatcgtcgcgcccatccaattgaaggcgaccggcagctttccaaaggcctgcgtggcatccgtgaccgcaagcccttcgggcagatcctggatgacgccggtttccgagttggcaagctgaagacaggaactctgcgggtccaaaaccgcgacacgaccctgagcctcaactgtaagatcctctttgatccaagcccttacagcgtcatgctcaagcgcggatccgtgtagatcacgccccatcaacgcaagtgcggctccctcggtcgaacccgaggtaaacacgatgtctgccccgtcggcgccaaaggccgctgcaatctgggcccgggcacgctccaccacggccttggccgcgcgtccttcggcgtgcaccgacgacgggttgccgcacacatccatggccgcgatcatcgctgcccgcgcgtcgtggcgcaggggcgatgtggcgttatgatctaaataaacacgagtcatggagtcatattttcaggcagtcacagttgcattcacgcagaggtcaaggggggcctcgcgcgtggtctattcatcgaccacggagaagagattgggcactgctggacagggcgcgaggtcgttctcgatcacatccgaaaggcgtgtttgatgaagaaagacgtagacatgcgcactcagcccctcccacagacggttggtcagtgattgcgccctgctcccacttgatccacccgacgcccctgcccccttgtgcatggcgtctacggtctcatcaacggcggcgaggatctcaacgacccgaatttcggatgcgggccgcgccagacgatacccacccccgggcccacgcacggaggccacaagcccgccacgacgtagtttcacgaagagctgctcgagatacggcaaagagatctgctgacgcttggagatatcggccaggacgaccagtccctctgatggctgcaacgcgatgtcagccaaggccaccattgcgtaccgtccttttgtcgaaagcttcatctgccaacccttttgtcgaaaaagcagcaaatgattgacgatagccctgccaatgcgtatctcagcttgacagggtgccggtccttcacctgcgcctctttagaacagttctaaggtgccggataaaattcgtcaagtatttgtctccgccacctcgccaagaagcagagtaggattaacccacccatgcctgaggtcattttccccggacccgaaggacgcctggaaggccgttatcacccgcaaaaggaaaaggatgcgccgatcgcgatcgtgttgcacccgcatccgcagttcggcggcacaatgaacaacaaggtggtctacaacctccattatgccttctacaacatgggctttaccgttttgcggttcaatttccgtggtgtgggtcgctcgcaaggcgaatatgatcaaggggtgggcgaactctcggatgccgcctccgcgctggattatctgcagtcgatgaacaacaactccaagcactgctgggttgcgggattctcctttggggcctggatcggcatgcagctgctgatgcgccgtccggagatcaccggatttatctctgtcgcgccgcctgccaatatgtatgatttctccttcctggcgccctgcccgtcttctggtctgatcatcaacggcaccgccgaccgcgtggcgccgcctgcggacaccgtggggctggtgaacaagctgcacgagcagaagggcatcaccatcacccacgaagaagtcgaaggcgcggatcatttcttccaggagccgcatatggacacgatgatcggcagcgtgaccgattatgtgaagcgacgcctgacagagaacacccgctgatggggacgctggacacactggctgcaaagctggcggaggacaccctcaaggtccaagatgcgctcggcgaagatcgcatctacatggagatcgcccaggtgctcggggcggcctcccaatctcttgaagaagcctttctgacagaggttcgcattcgtcttgccgagcgcaaggcccgtgattttctcagcaaacgcctggaggccgccaaggctgcactcgaggcagaggccaaaaaacaccaatgaccacagatcttgagcagcaattcgaattcctcactgaaatcgaaaggctgcgcgaggtggaacggcagaaccttctgctggacggcagccgggtagaaaattcggccgagcacagctggcatctggcgctctatgcgctggtgtttgccccctatgcgccctccgacgtgtccataacccgtgtcatcgagatgctcttgctgcatgacatcgtggagatcgacgttggcgatcatccgattgatgagccaacagactgggaggcggtggcacaagccgaagaccgcgcgcagcgacggatattcggactgcttccagaagcgcagggccaccggctgcaggcgctctggcaggaatttgaagcggcgcatacagcagatgcgcgctttgcaaaatcgctggactactgccagccgatcttccagacgctttgcgctgtttcgcctcccgccgatcaccttcgggtggtacgcgaaaacctgaccaccggtcgcgccacctctcttcgagagcggtttcccgaggcttatgcagcagcatgcagcctcattgacggtcagaccgtcagcgatccggactttgcagcacggctcgcgtttctgtccgaagctgaccggttgaagtcggttctacgcgcctcgcggattgcctccggcacccgatatgaaaactcggcagaacacagctggcacatcatgctctatggctggatcctcgctccgcatagcctgtcggaagtcgacgtctcgcgcgttctcaagatgctgctactgcacgatctggtcgagattgacgccggcgatgtgcccattcactccaatctggacgccgccgcgctgcgccagatcgaagagactgagaaagccgccgcagagcggatctttgggctgttgccggacgcgcaggccaaggactgcctcatgatctggcaggaattcgaagccgcccagagcgcggatgcggtctttgccaaatccatcgaccgcgtgcagccggtcttgttgaatattgccaccggcggtggcagctgggtggcctatgatgtcaccctaccgcagctggaaacccgcgtgggcgtgaaaattgcgcggggcgcaccgaaggtctgggaccatgtgcgtgcgcttctgttgccctggtttacggcacaaggccgcctctgaaggctaagaacccggcgcgcacggctcaatcgatgggcgcgcctgcatttcccctcttgcgtcggcgcgcatggcaggatttgaggggagcatgccctgcccgcttgaggtgggactctcaggaccgatgaggacatgccatgcattatctttacctgatggccgccgttttggccgaaaccattgggacaaccgcacttcaggcgagccagcaattcacccggctgctgccgtctgtgattgttgtcgttgcttacggcctgtctttctttctgatgagcctcacgctcaaggtgatgccagtggggatcgtgtatgcgatctggtccgggctcgggattgtcctgatcgccaccatcggctttcttgtctttggccaacgcattgatctgcctgcaattgcgggaatggcgttgatcatcacaggcattctggtgatccacctgttctccagcagctctggccactgatacccgccgcaaagaccaggatcacgcggcagtgcggcgacagttgtggctttgtccctcttttgcactagccatgggggctttatcgcggtatgcgcccggcaaccccaatcaaaggcatacctcatggacctgcgcaatattgcgatcatcgcgcacgttgaccacggcaaaaccactctggttgacgagcttctgaaacaatccggcgcctttcgcgaaaaccaggccgtggctgaacgcgccatggactccaacgatctggaacgcgagcgcggcatcaccatcctggccaaagccacctcggtagaatggaacggcacgcggatcaacatcgtcgacacccccggccacgccgactttggtggcgaagtagaacgcatcctctccatggtggacggtgttgttctgcttgtggacgccgccgaaggcccgatgccgcagaccaaattcgtgacctcgaaagcgcttgcgctgggccttcgcccgatcgttgtgctgaacaaggtcgacaagcccgatgccgagcccgaccgcgcgctcgacgagtgttttgacttgtttgcaaacctcggtgcggacgacgatcagctcgacttcccctccatgtatgcgtccggccgctccggctgggccgatatggaactggatggtccgcgcaaggatctctcggcgctgtttgacctcatcgtaaagcacgtccccgcgcccaagcagatcgcgcagaaggatgaacccttccgcatgctcgcaaccacgctcggctccgaccctttcatgggccgcatcctgaccggacgtgtggaaagcggcacgctcaaggtgggcgacagcctaaaggcgctgactcgtgagggcgagttgatcgagaacttccgtgccaccaagatcctcgcgttccgtggtctggcccagcagccgatcgatctcgccgaagctggcgacatcgtgaccatcgccggcatggcaaaggccaccgttgcggattcgcttgtggacacctccgttaccgaagccctgcccgcccagccgatcgatccgccgacgatcaccgtgacctttggcatcaacgacagccctctggcgggtcgtgatggcaagaaagtccagtcgcgcgtgatccgggatcgcctcctgaaagaggccgagctcaatgtcgccatcgaggtcaccgacacccccggcggtgaggcctttgaggtcgcaggtcgtggcgaattgcagatgggcgttctcatcgagaacatgcgccgcgagggctttgaactctctatttcgcgcccgcaggttctgttcaaagaagagaacggtcagcgcatggagccggtcgaggaagccaccattgacgtggatgacgaatactccggcgtggtgatcgaaaagctcaccggcaaccgcaagggcgagctcgtagagatgaagcccgccggtgcaggcaagacccgcatcatcgcccatgtcccgtcacgtggcctcatcgggtatcacggtgaattcctcaccgacacccgcggcaccggtgttctgaaccgcgtgttccacggctggaccccgcacaagggcgccatcccgggccgtcgcgcgggcgtgctgatctcaatggagaacggtcaatccgtggcctatgcgctgtggaacctcgaagagcgtggcaagatgtttatcggcgcacaagccgacgtctacaccggcatgatcattggcgagcacagccgcgacaatgatctcgaggtgaacccgctcaagggaaagaagctcaccaacgtgcgggcctctggctctgatgacgccgtgcgcctgaccacgcccgtcacgctctcgctggaagaggcgattgcctatatcaacgacgacgagctggtcgaagtgacgccgaactccgtgcgtctgcgcaagcgctacctcgatccgcatgagcgcaagcggatggccaaggcgaacagctgatcgccccctcagaaatgcaaaaaggcccggtcaaaactgaccgggccttttcatttgagcgcttggtatcagaattgagggacaaagtcctcgatctccgtgtcatcagccgtgaaacggcagaaagatcctgcgggaactgcttcccagcattcgcctttgtggaggggctcggacaccacgagccgcccggtgccatctgcgcttttgctgctgtagaccgtgggtgcgaggtgatccgaggcatagcgcaccgcatagagagcgccgccgcagctgaaggccgcgccaatccgcatgtggggtgtgtgaccaaactctctgctcaacgcctccagcctgccgactgcgcgctgcatggcgcccttggggtcctcgtagagcccttccgctatggcgatcaggaacagcgcttcgctatccgtcgccccctttcgcgcagaataaagctcatccgggattatcatatcggcgcgacggcgaaagttttcaaacccgcccacctgaccgttgtgcatgaaggaccagcacccatgggtgaagggatgacagttattgcgactggtcgcggttccggttgaggcgcgcacatgcgccagaaacaacccggagcgcacctgatgggtgatcgacttcaggttcggatcggaccaggccgggtgggtgtcgcgataaagccccggttcctcgcggctgtcataccaggcgatcccaaatccgtcggcattggtttgtgttttacactcaaaggcgtggacagattgcgcgaccagcgaatgctcgggcttgcacacgacttcgtccagatggacggggggaccaatataggcggcccaacggcacatgatgttctcctcaactcgtctggctattctctcacccagacgtcaaggtgctgttaatcacgaaaaagggccacgcgaaacgcgcagcccaatcttctgttttgcacaggttttacgcctcaggcgctggtttcgacaaccatcagctcacgttcggatgcatcgcgtgcgtggctcagcgcctcttggtattcagggctgttgtagcagtcgactgcggcctcaacgctggggaactttgcaaccacattgcgcggacgctccttgccctcgagctgcacaaagcggcctccccgggcgatgaactctccgccatgtttcgcaatcgctggcccggcaagctcggcgtattttccatacgcgtcggcatcggtgacggttacatgagcaatccaaagagctggcatgatgtcttatcctttcaaaagagcttcggcagccttgatggcctcgtcggcgccggagaaatccttaccgccgccctgcgccatgtcgggacgaccaccgccccctttgccgcccacagctggcacagccgccttgagcacatccacagcagaaatttcgccggtcagatcatcggtgaccccggcagcaacggcgaccttgccgtcatcctcggcaatcagcaggatcacgccagagccgattttctgcttatgcgcatctatcagcccacgcagatccttgcccgagactccctgcagcgcctgaccgagaaaggtcttgccgccgatctctttggcttcagcaccgccaccggcgccgccgcccatggcgatctgctgcttgagggtcgcaatctcgttctgcagggccttgcgctcgtccataagcgccttcagccgttccatcacatccgcaggctgtgccttgagcgaggcggcaacctccgccatccgcccggcttcgcgttccagatgcgcaaaagcggccgcgcccgtgagcgcctcgatccggcgcacgccagccgaggatgcgctgtcacccaagatcacaaaggtgccaatgtcaccagtctgtttcacatgggtgccgccgcagagttcgatggagtaggtttcgccatccgcacccttgccagtcggtgcgcgccccatggagacaacgcgaacctcttcgccgtatttctcaccaaagagcgcctgagcgcccagggcgcgggcatcatcgggcgtcatgatgcgggtgctgacggccgagttttggcgaatgaaatcattcacttctgcggagatcttcgacaagtcctctgcgcttaccgccttgttgtgactaaagtcaaagcgcagacgatctgcggcgttgagcgagcctttctgggcaacgtgatcgccaagcgcattgcgcagcgcctcgtgcagcaggtgggtggcagagtggttcgcccggatctggctgcggcggacgtggtcgacttccatcgctgcaccgctgccgacagcgatctcgccctcggtgacttctgcgatgtgaaggaacaggccttcgaccttcttggtgtcggtgatccgcgcagcgccgccctcaaccgtgagcataccgctgtcgccaacctggccaccgctctcgccataaaaaggtgtctggttcaggatgatctgaacgctctcgcccgctttggcactgtcgaccctggcgccgtccttgaccagcgccacgatctgcccctcggctttttccgtctcatagccaaggaattcggtcgtgccctcggcgtcgacgatatcaaagtagactttgacatcggtcgcatcgcccagaccaatgccgccggcgcgcgactgctctttctgggctttcatcgcggcgtcaaagccgtcggtgtccacctcgatgcccttcgcgcgcagcgcatcctgagtgaggtcgagcgggaaaccgaaggtatcatagagcttgaaggccgtctcgcccggcaggacatcgcctttttctagatcaccggacgcatcgtccaggagcttaaggccgcgatccaaggtcttgagaaaacgggtttcttcctgctcgaaggtctcttcaatgagcgcctgcccctgccccagttccggataggccgctcccatctggctcacgagcgcgggcaccagcttgtgcatcaccggatcggttgcccccaagagagaggcatggcgcatcgcgcgacgcatgatgcggcggagcacatagccccgtccctcgttggagggcagcacaccttcggcaatcaggaaggaacaggaccgcaagtggtcggcgatgacgcggtgatgcacgttctggtcaccatagggctcgctcttggtcaccgtggccgaggcctcgatgagatatttgaaaagatcggtctcatagttgtcatgggtgccctgcaagagagccgcaatccgctccagccccatgccggtgtcgatcgactgcatgtcgaggtccaccatggacccatccgcaaagcgctcgttctgcataaaaacaaggttccagatttcgatgaaccggtcgccatcttcctcgggcgagcccggagggccaccccagatgtgatcgccgtggtcatagaaaatctcggtgcagggaccacaggggcccgtgtcgcccatctgccagaagttgtcagaggtcgcaatccgaatgatccgctcctccgggacgcctactttcttccagatttcaaaggcttcgtcgtctgtgtgatagacggtcgtgtagagtttatccttgggaatatcaaactcgccggtgatcagctcccaagcaaaggggatcgcctcgtttttgaaataatccccaaaggagaagttgccgagcatctcgaaaaacgtgtgatggcgggcagtatagccgacattgtcgaggtcattgtgcttgccgccagcacgcacacatttttgcgccgtggtggcgcggacatagtcacgccggtccacaccggtgaagcaatttttgaattgcaccatgccggagttggtgaacatgagcgtcgggtcattgcgcggaaccaacgggctggaatccacgacctcatggccctgctttgcaaagtagttcagaaaggtcgaccggatgtcgttcaagctgggcatgtcaacgcggctctctagatgtgattggaacagtccaaagcggtttatcgcgcccatgcagggctgtccaccgcccaagttgcctggcgcatattcccaaggaaaacagtggggttggtcactgttttttgatcataagatccccggattgaaagcgtccagcctgcgcgacggaacagagaattccgcgcagccgcaatgcgcggttttctggccggttcacccaatcctttgccgcgacaccatagcgggttttccactttacgcagccatcgttgaacacatccgacacccgcaacagcgcgctacccacctgcagcagctgccccacggggaggttttcttcggacagatccatatcgacgataaacgtatcgcccggatggggcacctcttcccggtgacgccagaccagatccagcacccgctttgacaggatgcagacctgaatgcccggatgggcgctgccgtcgtccaattgcagccaaggtcggctcgaccagcgttcgccgggaatgccgccctcgggggtgacagtaatctcatccacaaagtggcgctgattatagccgggacgcaggcacaacatggaaatggccgcccgatccttcggggcggccatcacatgcggcagcgccgcatcaagttcctcagcggtgacgtgcatcgtcagccttcaaacagaacatcgtcgtcttgcgcttcggggggcatgtcgaaatcaagcccatgcgcagcgcggatcttgtcttcgatctccagtgcgatgcgggagttttcgcgcagataccctttggcattctcgcgcccctgcccgatccgctcgtccccataagagaaccaggcaccggacttgttgaccacgcctgcggccacacccagatcgagcaattcgcccatcttggagatgccttcgccatacatgatgtcgaattccacctgtttgaacggcggtgcgaccttgttcttgacgaccttcacgcgggtggcgttgccgacaacctcgtcgcggtccttgatcgacccgatgcggcggatgtccagtcgcaccgaggagtagaacttcagcgcgttgccgccggtggtggtctcgggcgagccgaacatcacgccgatcttcatgcgaatctggttgataaagatcaccatgcatttggagcggctgatggaaccggtgagcttgcgcatcgcctgactcatcaggcgggcctgcacgccgacgttgctgtcacccatgtcgccctcgagctctgacttcggggtcaaagccgccaccgagtcgacgatcaccatgttgaccgcaccggagcgcaccagcgtgtcggtgatctcaagcgcctgttcgccggtgtcgggctgcgaaatcagcagctcgtccagatcgacgcccagctttttggcatattgcgggtccagcgcgtgttcggcatccacaaaggcgcaaacgccgccctttttctgctgctcagcaatacagtgcagcgtcagcgtggttttcccggagctttccggcccgtagatctcgacgatccggcccatcggcagaccaccaatgccaagcgcaatatccagcccaagagagccggtagagcttgcctcgatctcttgcaaggctgtgccatcgccgagtttcatgatcgagcccttgccgaactgccgttcgatctgggcaagcgcgctgtccaaggccttctgcttgtcgccgctcttcttgtcgtccttcatggtcaatagatccgccatagtacccgtgtccttctctatgtgtcacacccggaggcggacgacaatgactgctttgttctcctcttgttccttatgaggtcaaaacaagaacattgcaagatgatttccagttcgtttacgggactggcagtgtggttaaggataggtttacaaagcgaagacagtttgaactattgccggagctttaacgtcatgatggtattttactgcgcgcggctggtgctgctttcggtgcccaagaccggcacaaccgccctgcagagcgcgctgaggcctcatgccgatctggtgatttccgacccgccagagctcaaacatgcgccgctctatcgctacaatcgctggatccgtccgatgtttgagaaggtctgcgatgccgaactcgaagtcgccgccatcatgcgcgagccgatcagctggctcggcagctggtaccggtttcgccaacgtccgcatctggacgggcagcccgcatcaaccaaagacctcagctttgatgaattcgtgactgactattgccgcggcaaacgacccgctcatgccaatgtaggaagtcaggccaagttcctggaatctcagccaaatggctgtcgtgtgacgcatctcttcgcctatgaagacctcgcgccctttcacgcctttttgagggatcgtacgggcctcagttatgaaacgcagccggaaaatgtgagccccaagggcgatctaacactttcagccgccacggagcagaaattcaggcgcaaacaccctgaggagtttgagctctatcaatcgatcaccacctgaatcaggcacgccgcacaacgcggagcttgcttactgaagttgagactgaacggtttccgtgagctgcgagagcgagaacggtttggccaggaagaccgaattcggcacgtcgggctccgcatcgccaaaggccccttcggagtacccggacacaaagaccaccttggtgccgggccgggttttgagggcttcccgcacccaagtcggcccatccatcccgggcatgatgacatcggtcacaaagacatcaacgctgaggtttggatcttcgagcgtgtcgagcgcctcttcagcggattcggcctcaaggaccgtatagccgcgcatgcgcagcgcgcgcgatgcaaaggcccgaaccggagcttcgtcctccaccaagagaaccacgccttcgccgtgttgtgctgccggtgccttggtcttggccggtgcgaccgcttcttcgacgtcgtgtgacgcatcgctgcgataaaccgggaaatagagcgtgaacttggtgccctgattgagcacggaatccacaaaaatgaagccaccagtctgtttgatgatgccataggcggtggaaagcccaagccccgtgccttcgccggtgcgtttggtggtgtagaagggctcaaacaccttttgaagcttgtccggcgagatccctgtgccctcgtcgctcacctggatggtgacccactcgcccggcggcacaagggcgcgatcgcgttcaagtgctgtgtcgagcgctactacctcagtttccacgcggatttcgcccccgtgtggcatcgcgtcccgcgcattcaccacgaggttcatcagaacttgttcaagctggcgtttgtcagcccgaatggagcgcataaccgggtcatggctcagcgtgagcgagactttctcccccaccagacggttcagcagatgggtcagatccgagagcgtctcgcgcacatcgagcacctcgggttgcagggtctgcttgcgcgaaaacgcaagcaactggctcaccaaggcagcagcgcgattggcgttttcatggatctggatcagatcaccataatcctgatcgccctgatcgtgacgcagtaaaagcaggtcgcaatgccctgaaatcgcagtcaaaagattgttgaaatcatgtgccacgccgcccgcgagctgaccgatcgcctgcatcttctggctttgaacaaattgcgcctcaagggttttcagctcggttgcatcgttcagaaccgccagcaatagcgtctcgccatcctcgatgatccgcgtgagcgtcacctgcacaaagacttccttgtcgtcgcgtgacacccgcaggaactcggacttatgcggcgcaagccccttggacgtttcttgcagccaatcgttcatggggcggccaaggccctccatcaattgccccaactgcacgccttcggcttcttcgatgcccaaaagccgcatggccatgcggttgaccgccatcacctcgccacccgcgcgaaccttgaggagcggcaccggcaggctctcgaacccggtatgaggcccactgtcctcgacaacggctttcatgaagtagatttcgctgcgcccctggccgcgcgcgtgttcgctgaccagcacctcaacggggccgcttttggtcatgatcgtgttgatccgccccgggatcaccggcagtgacgtaaagagccgatctgtcgatttcacgcgctctccgatcaggctgcgcgcggattcgttcatgaacaggacggcgcccgtgcgtccaaccgagatcatcggcaccgggctggcatccgccgtgcgcccggaggggcgttcgcccatgtcctcaactcgccacaagaagctgccattggccatctcatgcaccgcaatgcggacgtttccacgccgcgtcacgatgtcctcgcgggccgacccttcgagcttggcacggctctgcaaacggaagagcaccgcggacggattggccagaaccgagcgcaatgtgcccgagatcgtatcactttcgctgccctcaaatcgcttgagcgcagcggtgttgcaggcatggatcaccccgtcctcgtcggtgacgaagctggcggatgcgtccttgtcgataaagcccgtcagcaactcgctcgccatcgtgcgcgcgcccatgcggacccgggtctgtatcaagatcatcgcagagacaccgcccagcgtcagcccgactgccaccagcgcccgcccgatccactccggcaccggcaacagccacggcaacacgatcaacagcgccgatagcagaaaggtcgccgccaagcgcgcctgctccggcgtctggatcttcaggctgggggcaatcgaagaagagcgaccaatcattacggctccgttaacagtcttattgacgcactatcatgacacggatggttaaagcgaggttaaccacagcgccgaaatgcgaaactttacaatcgtttattctgtgccattccgccgaaacaccgatacgtaaaatccgtctgttccactatgcacatgccatgccgtttcagacaagtgcgcccagccggtgtgccgctcctgaaagcgctgtgtctgcaggctgttttccacatccagcatcgaacaggtcgcaaaggccaggacgccccccggcgcgacgcgttgagcagcttcatccagaattcgggcctgcagcgctacggtgtcatcaagagtgtcctgcgtgaggcgccacttaccctcgggatcacgcctccaagacccgctaccactgcagggcgcatcacagagcacgaggtcaaacggcgcctgcgttacaagctcctcggaggtaaggcagcgaatatccgcccccgcccgcatggcgcgttcgggaatgtcgcgcatgcgtcgtgggtctgcatcatgcgcatagacctcagcctgggtctgtgctgcaatcgccagagccttgcctccaccgccggaacaatagtccaatatcctcggggcattttgcactggcagcttatcgacgactgcctgactggcagcgtcctgcaattccacaaagccttgcaggtagctttctgcgttttttatgcggcgcgccccctctgtcacggtcagggcggtcggcgaggctggatgcggctctgtggcaatgccctcccgcgtgagccgcttgatggcgttgtcgcgatctcctttcaagaggttcacccgcagatgaactgccgctcgagacctgagcgcggttgccgctgcaatcgcctcagtgccgaggctgcgtgaaaacacgggccagagccactccgggatatcatgacgctctgcgtcgctgtgaaattcgggcgcgatgctctgttcggcggcgctgaggggggacggcgcatgcccttcaccgtgaaagagcactgcctgatcaagcccttgatccttgcaagcgccaagcatcagcccccgtccggtctcacttccccccagaaccgcataggaccggcggcaccgaagcgcctgatagacgtgatcgcgcaccgcggcgcggtcttttgatccggcaaatcgactgcgccgcgcccagttggtcagggtcttttccacagcctgacccgcgaggatttcatcgagaatttcaatagccgcctgtacgcgcgcacccggtgtcatatttgcatccgctccagagacgccatgcagattgccggcgcggtttccgtttggatgcctctctaacgcccgcgccgggcacgccacaagcggtttcaacaccgatggcgatgacctattcctcagccgccgcggcgcctgcgccgaccaccgctgcgggcggcgtctgccccggcggagttgaagctcacctccggcaggctcaccacgctttgcaggatcgggaaaggctcggcggagttcggaattgcagaagcattgacaaaatgctcctggaaacgtggctcgacagcggtttcgactttctcgatcttgcgcacggtatcttcgatctcttgacgcgcgtcagtgttgaggagcgcaatccgcgcgcccgttcccgccgcgttgcctgcgcttgtcaccttgtcgagggggcaatcggggatcatgcccagcaccatcgcatgtttggccgagatatgcgcgccaaaggcccccgcgagaaccacgcggtccacctgatccacgccgatcttgtccatcagcagccgcgccccggaatagagcgccgccttggccatctggatcgcccggatgtcgggattggtgactgtaatgcgtggccccccctctgcggttgcgtcccacaggagataggcattggtgcgaccttcggggacacaccgcgcgcttccggtctgctcggcggatccgatcagacccgaggcatccaatacaccagccagccgcatctctgcgatggcctcgatgatgccagagccgcagatgccggtgatcccggtggttgcgatgctctgctcaaacccgtcctgatccgaccagatctcggacccgatgacacggaaccgaggctctttggtgacgggatcgatctcgacacgttcgatggcaccgggggctgcacgctggccggaggaaatctgcgccccctcaaaggcagggcccgttggcgaagagcacgccagcactttatccttgtttcccaataggatctcggcatttgttcccacatcgacaacgagcacgaggtcatcggatttatccggtgcctcagagagggcgacggccgctgcatccgcgccgacgtgtcccgcgatacagggcaacagatagatccgcgccgcacggtgaagtttcagatccagatcgcgcgcttgcagcgccaaggcgtccgatgtggccagcgcaaagggtgcctgtccaagttcaaagggatcgattccgagaaacaggtgatgcatgacggggttgcagacaaagaccgcgtccatgatcagcccctgatcaatctgcgcctcttctgaaatctgcgaaaagagcgcgttcatcccttcacgcacggcgcgggtcatctccagatcaccgcccttgttcatcatagcataagacacccggctcatcagatcttcgccaaagcggatctgcgggttcatgatccccgaggacgccagaacctcgccggttttgagatcgcacagatgcgccgcaatggtggtagagccaaggtccaccgccagcccgtaaaccgtaccttcatagtagcccggccagatctgcatgatgcgcgcaggcgcggtctcagtccccagttgcaccgcgaccgtcaccgtccagccgcctttgcgcagggtcggctgcagctctctaagaacctcaaaatcggcttttacgcccttgatattccactgcttctcaagcccctcacacagacgctccaagtcgccggtgggcttgtgcatatccggttcttctacctcgacataatacaggcggattgaggggttcatgacgatgtcgcgcgcctcggcccgcttgcgaaccacttgcttgtggacctggctctcggccgggacgtcgatcaccacgtctttttcgatcttcgcctgacagcccagacggcgcccgtcgatcagaccgcgcttgtccttatagcgctgctcgaccttgttccattccgacagggcgtcatcggccacggtgacaccgtgtttcgagaattcaccataagacggcgtgatctggcatttggagcagatgccccgcccaccacaaacggaatcaagatcgacccccagctggcgcgccgccgtcagcaccggagtgccaactggaaaacgtccgcgtttgccggagggggtgaacacgacgaggggatcgttcgacatgtctttagcctttaattctgcgcagttgatgcgaagcatatggcagtttcaggcgcgagaacgtcgaacaccgccgttttctgttccaacggcggcatttgcgcaaaatacccgagagacctcaggcctctctcagccacgtcaggatctcttcgcgattctcgtccagcttgggtgcggcggggcgggtgcttgggtccttgagcgcgctcatcttgattgggttgcctgccgccacataggccgggtttccgtcccgatcgagcacatccaccaccatgttgcgtgcccggatctgcgggtcctccagcacctcggccacattctgtatcggccctgtgggcaccccagctttggtcagtaggtcgatccagtgccgtttgccatgctccagtgtaactgcttcgatcaaccgcttgagaaggcgcgcattttcgcatcttgcgggattggtggcaaagcgctcatcctgcgcaatgggcaactccaatgcctcgcagagccgggcaaacagaacgtcatttcctgccgcgattacaaacagcccatctgccgcatgaaaggtctcaaacggggtaatcgagggatgtcttgcccccgagggccggggcgcctcgccgcttatggtggtcagtgcaattgcatgttccagcatggcgagttggcaatcaagcatggcaatgtcgatcttttgtccttcaccggttttctcgcgctgcaacagggcggccaggatcccttgcgccagaaacataccggcggcgatgtctccgatagaggcgcccacgcgcacaggttcgcggtctcgttcaccggtgatcgacatcacgccgccgcgggcctgcaccaccatgtcgtaggcggggcgctgactgtcgggaccactgtgaccaaagccggaaaccgcaccatagatgagcttggggtacttggggtgaaggtcatcccaaccatatccgaggcgttccatcacaccggggcgatagttctcaagaaccacatccgatttttgaagtagctcttcaaaaacaatacggtccttggcattcttgaggtcgagcgcgatgctttccttgccatgattgatggttgcaaaataggcgctctcgccgtctttgaacggcggaaaggcgcgggtgtcgtcaccaacgccagggcgttccaccttgatgacccgcgcgccgagatccgaaagcgtcatggaggcatagggcccggcaagaacatgtgtgaggtcgagaatgatcaatccgtcgaggggggctaacataggtgtctccgcgcgttttccatatgcctacccaatacccggcaaatccaacacctctttgatctgcatcagccagcggggcgaaggccgccgcgatgcggcgaaaaatgtcgcgccccccttccccctttcgcggaactgtgcaatagggtcaccgccaaacggtgttttgcatggggaagacagatgcagattcgtgaggctctcacctttgacgatgttttgctggttccggccgcatccagtgtactgccaaatacggcggacacgcgcacgcgggtgacccgtgctatctcgctcaatatcccgctgctgagttcggcaatggacacggtcacggaatcgcgcatggcgattaccatggcgcaggccggtggcatgggcgtgatccacaagaacctcgacatcgaggagcaggcccgtcaggtgcgtcgcgtgaagcgtttcgagagcggcatcgtctacaaccccatcaccctgcgcgccgaccagacgctggcagatgccaaggcactgcaagaacgctatcgcgtcaccgggttcccggttgtggatgacagtggccgtgtcgtcgggatcgtgaccaaccgcgacatgcgctttgcctccgatgacaagacgccggtttcggtgatgatgacctctgacaatcttgcaatgctgcaagaaccggcagaacgcgacgaggcgatctctttgatgaaggcgcggcggatcgagaagctgctcgtgaccgacaaggacggcaagctgacgggcctcttgaccctcaaggacaccgaacaggccgtcctgaacccgacagcggtgaaagacgacctgggccgccttcgtgttgcagcagcaagctccgtcggggatagcgggttcgagcgttccgaggcgttgattgatgcgggcgtcgacgtggttgtggtcgatacagcccacggccattccgctggcgtgatcgaagccgtgacacgcatcaaggcgctatcgagcgatgttcaggtcatcgcaggcaacgtcgccaccgcggccgcaacacgggcgctcatcgatgcgggcgcggatgcggtcaaggtcggcattggtccgggctccatctgcaccacccgcatggtggccggcgtcggcgtgcctcagctgacggccatcatggattgcgcaagcgctgcgggcgatacgcctgtaattgcagatggtggcatcaagttctctggtgactttgccaaggccatcgccgccggcgcctcctgcgccatggtggggtcgatgattgcgggcaccgacgagtcgcccggcgaagtcattctctaccaaggccgctctttcaaatcctatcgcggcatgggctccatgggtgcgatggcgcgcgggtctgcggatcgctatttccagaaagacgctgccagcgacaagctggtgcccgaaggtatcgaaggccaggttccgtataagggcgccgctggcgcagtgatccaccagctcgtcggcggcctgcgtgcagccatgggctataccggctgcgccactgtcgatgacatgcgcacctcttgtgaatttgttcgcatcacgggcgcaggcctcaaagagagccatgtgcacgatgtgcagatcacccgcgaatccccgaactaccggatcggctgatcactccaaatcacagacaaagaaagagccggaacccactgaggttccggctctttttacatcagcgccccttgaagagcccgcccagaatcccgcgaacgatgcgccgcccggtggtgcctttcagttctttgatcaccgactcggacatggcggaggcaaaagtgtcaccgccgccgatccggcgcgaggtggatcgccccacgcgactgccgctataccgtcgcgcggcgctgaactcgcgcaccaccggatctggcgctgtttcggcttgcgcctcggcgtctgccgcttctctcgaggctttgtccgcccgctctttcaggatttcataggctgaatggcgatcaacagacttgtcatattttcccgccatatcagacgcttgcattacactcctgcggaactcttcggtgatcggtccaagctggctcgagggcgggcgaataagcgtccgctccaccacgccaggtacggcctttttctcgagcatggaggtcaccgcctcgccgacgccgacctcacggatggcgtcttcggtcgaaaaacgcgggtttgcacgataggtttctgcggcaagcttcagcttcttctgatcccgcgccgtaaacgcacgcagcgcatgttggatgcgattgcccaactgccccagaatatcctcaggaatgtcgtccggagactgggtgacaaaatagatcccaacccccttggagcggatcagccgtgcgacctgttccaccttgtcgatgagggctttgggtgcgtcttcaaacaggagatgcgcctcgtcgaaaaagaacaccagcttgggcttttccggatctccgacttcaggaaggctctcgaacagctcgctcaacagccacagcaagaacgtcgcgtaaagctttggagaagccatcaatttatccgcggccagaatgttcaccatgccccggcccgcagcatcaaagcgcatcagatcctcaagatccaaggccggctcgccaaagatcagcgccccgccctggttctccagaaccagcaggcggcgctggatggcgccgatcgaagcggtggagacattgccgtagcgcagggacaggctttcgcggttctcgccgacccagaccaacagcgcttgtagatccttgagatccagcagcggcagcccctgctcatccgcaagccggaaggcaatgttcaggataccctcctgtgcttcgctgagttccagcagacgcgacagcagcaaaggccccatttcggcaaccgtggtccggatcggatggccctgttgtgcaaagagatcccagaaggtgacgggggtgtcgtgataggaaaaagaggtaaatccaattttttgtgctcttttcacgaaaggcgcatgcaactccgccgtttcgctgcctgcgcgcgccagtccggacaggtctcctttgacatccgccaagatgaccggcacgccttcattcgagaaactctcggcaaggatttgaagtgtaacggttttaccggttcccgttgcgcccgcaatcagaccgtgccggttggcatatttcaacgtgaggtattgtggatcgccatatgcgtcccctccgccaccgacgaatatttcctctgccatgcccgtgtatctccccaaattgcgcccggatcaaaatacaatgttaacctttatgtgccagcgtgaagatgcccgttggctcgaatgcggttgagtcatcggacatttcctccctgtcagactggccgtgcctcgcgcacggccttttttttatctcgctctctgcctcatcggcgaaaccttcgccagactgcagccagcttgtcatattttcacagtaattggaccgtaaaacgccgcgcagcagtctgggatcattttttttctattccatgttgaccgatggcgatttcgctcgtaacgttctgaataataactaagtcggccagtccgacggggagatgtagacgcaaaaagggggcttcggcccccttttttcgttgcacccgcatacagtgtgttcgccctcgcccgaccaatcccacaaaacacgcccttgccaggtcagacgcgatgacggcggccgatcaagacgcaactcagctgcaaatcggcggaaatcagggatatgtttgggcccgcccgcatattcgcctgacactcatgggatagcgtggtaaacggcgaggacagattcaaacagaagaggcatttatgttgaaatccctcagctccgtctctctcgcacttcttcttgcggcgtcgccgctggtggcgcaagagacgacagatcaggacaccgccgatcaaaccgcagaggaaagcgcagacgcccctacggcttctgcagatcaactgctcgatctgggaacccctgcagaggctgcgcttcaggttggtcagcgatattccaaagaaaaatttggcgattgggatctggcctgtgtccggacccagtccggcgatgatccgtgctcgttgttgcaggttctcctcgacgaagaaggtggcccggtcgccgaagtctccctctttcgcattgaacagaccggtgggcaggccgtggcaggcgcaaccgtgattgcaccgcttgaaaccctgctgcctgcaggcctaaccgtttccgtcgatggggcaccgggcaagcgctataacttctccttctgcaacaccgctggctgcatcgcgcagatcggccttacagaagccgatatcaacgcgttcaaacaaggtagccaggccatcttcagcctgcgcccggcgccagcaccggacaccaccgtctccgtgccgatgtcgctcaaaggctttaccgcaggctataatgccgtcgacgtcgtccagcagtaagcctctggcctaacaataagaagccccgcctgacgtatcgatcaggcggggctttttaatgtctggtcgatatgaggtctggcgggtttgagctccggcagaagattactgtgcgctcggacaggtctcagccctgaccgtcagacccgacgcagcgctagcacagcgttgaggccgccaaaggcaaaagcatttgacaaggccacgtctaccttggcctctcgcgcctcattgggcaccacgtccagcgcgcattcagggtcggcctcttcatagccgatggtcggcgcgatcaccccgtcgcgcaacgccatgatacaggccaaaagctccaccgcgcccgtcccaccaataaggtgaccgtgcatggattttgttgacgaaatcatgaggttatcagcatgcggcccaaagacatccgcaacagctgcgcattcggtcttgtcattggcggcggtgccggtcccatgcgcgttgatataccccacgtcgctggcgttgatctgagcatccctgagcgcgcccgagattgcacgcgccgcgccctgtttgctgggcatcacaatgtcggccgcatccgagctcatggcgtagccgatcacttcgcacaggatctccgcgccgcgggccttggcgtgttcatattcctcaaacacaaagatcccagcaccctcgccctgcaccatgccattgcggttggcactgaaggggcggcaggcgtccttggacatcacgcgcagtccttcccacgccttcaccccgccgaagcagagcatcgattcagacccacccgtgaccatggcgggactcatgccgctgcgcaccatctgaaaggcctgcgccatcgcatgatttgaggacgcacaggcggtagaaaccgtaaagctcggccccttgaggttgtattccatcgacacatggctggcagcggcgttgttcataagtttcggaacaacaaaaggatgcacgcgattcttgccatcctcgtagaccgatcggtagttgtcatcccaggtcgagacaccaccgcctgccgttcccagcacgaccccggaccgcgcagccaggtcgccggtgaactcgagaccggattgacggatcgcctcagaggccgccaccaaggtgaactgcgtgaaccgatcgtagagcaccatctgctggcgattgaagcgaccttctgcttcgaaattctggacttgcccgcctatcttaatcgcaagacgatcaacatcgcgaaagtccaactcgccaattccgcaacgcccttcacgcatggactccaaggtttcggcgaccgaatgccccagcgcgttgatggtcccggcgccggtaatcacaacccgtttcatcgcaaatcctcttgtccgatggcgctctgggcggttagcccttttcagcgatcagcttgtcaatcccggtcacaatggctgcgacatttgaaatatcgaaatcgctctgctcgggttcattcgcgttaaacgggatcgagatgtcaaactcctcctcgatcgcaaagatgctctcgaccagtccgaggctgtcaatgccaagatcttccagcgtgctgtcgagagaaacatccgaaggttccaacaccgcctgctctgcgatgattgcgatgaccttgtcctgcgtgctcatagggcggctcctgcgggagataagattgcctgtggtttactgactgcgccgctatttgaaaacagcctttttcaacgcatcgagatcgcgcatcaggcgcggcaaacggcgctgggctttgtacatctctgtgtgggtgtccatcttgaccgccggatagcccatcatcactcgcccggccggaacattcgagaggattttggtgcctcctcccgcaatcacgcggtcaccgataaagaggttgtcggcgacgccacattgcccgccaaggacaacgttgttgccaatatcaaccgaaccagagaggcccgtctggccgcagagcaggcaatcattgccaatgcggcagttgtggcccacatgcacctggttgtcgagcttggttccattgccgatcacggtgtcccgaatggtgccattgtcgatggtgcagtttgcgccgatctccacatcgtcgccgatccgcaccgatccaagcgaatgaatccgaacccaggactgggcggaggtgtcgccctgatctccgagcgttttccgggcattctcgacgccagacgtctcgggcgtcacataggaaaacccatccgcagcaatccgcgcgcccggctgggcgcgaaaccgcgcaccaatggtgacgcgcgcaccaatcgacaccatttccctcaggttggcctctggaccaattgtgacatccgcgccgatgaaacaatgcgccccgataagcgaacccgccccaatcttggcgtccggtccaaccacggagagaggcccgatcgtgacatccgcgccgatctcggctgaggggtcgatgacggcagaaggatggattcccgcagctaagcgctgacctcggtccatcatgcgggtgacaccgctcatggcgaggcgcggacggacaacaaaaatagcagcgtctagacccagagcctgccagtctgcgccctcccagacaagggcggcgcgtgcattgccctgcgtcagggcctcaccatattgcggcgacatcgccatcgcgagcgcctcagcgcccgcatcctggggctctgaggcatgtgtgatcttgaggtctagatcacccgccgcctgcgcgccaagtgccgtggcaatttcacgaacggtgaacatcaggccatccctccaaatgcggatcttggcctgagacttagccttgaacgccgggaagtgccacccctgcccgctccaaagcggaccagatctttgcgtcacgtccgtagacatcgcggcggaattcggcgcggccatcctgcgacacaaaggcggtgcgatagatcagatgcaccggcaccttggtttccagcggcactttggtttccttgccgctgttcagcacccggtggaagtagtcctttgggttctccgtctgaggcgtcaagagttcatacgcaaattcaaagggttgatgcagacggacgcagccatgcgaaaaggcgcgcacctcgcggccaaagagatgcttttgcggggtgtcatgcaggtagatgttgtatttgttcgggaacatgaacttgaccagaccaagcgcatttcggctgctcggaggctggcgcatggcaaacggaaagctgcgcgcggtgaactggctaaagtccacgttgtttcgattgaccacccgaccccgattatcggtgatctcgatgtagctgtgggcgttggggttattcttgagtttgggcagatattccttggtgatgatcgagcgcgggacataccagctcgggttgatcaccatatgatccatctcgtccgagaactctggcgtgcggcggtcgcttttggtgctgccgatcacagagcgcgtctcaaaggagatttcaccctcatccatgatcttggccgagaaatccgtgagattcacaaggatatgacgcaggccgcgctcaggggtgagccagcgttcgcgctccatggcgaccagaaccgacttgatccgatccgaaaccgggcggttcagctccttgagtgtgccctcgcctgcgacgccatcgacctcgaggccatgttcagactggaaccggcgtacggcgtcctcaacatcaaggtcatagctgcgtgtcgccgtgggcgccaggtagcccatcgacaccagcctgttgcgcagggcaagcacgctctggcccgtgtcgcccggctcgatcttgcgcacgggaacggttgcgccccagccgccagcctgcagcagcgcctcaagccgcatcttctcgcgcagcagagcacgatattgagaggaggtcggaacaagatcctgcaggaaggctgccgggcgatcggtcgcaatcccctcgaggaaacgcgtcgcatccaccttgtgcttttcccgcacgatgccttcgtcaatgcggacgggcgtgtcgatcagaccggtctgcaagtccgttgcgtagtccaccagggcccggctcagagcaacctcgaccgcgccaagatcgcgggtggaacggacgttgcgcatctgttcaacgaggtccgccgcccgcgccgacatatcaggcagcccatgcatggaggcctcttcgagcgcctgcatcagggcacggcgccgcgccgtcgcctctggtgtgtctgcggtccaaaggggggcgtattggttttgacggtaatagctggagaccgcctcgtcctcccacgccatctcggcaaccgcttggcgaaacccggtgctcgccgcctcggccttttcagcaaaaagcagggtcgtccccagaacggcggcaagaattccaccagtgacgaacgaagcaaatttcggggcgcgagccagcggcattgttgaaaaactccagtatgtaacgcagacgtccagttagactgtatccgagtgttggtaaacgagacccttgcaagtccactcacatttgcttcaccggcacccgaacgcggcgcagtgatgctttgaaaccccaattgacgcagaaacgcgcatcgcatgagggggaaaatagctcactccctccccttttgcgcaaatttttgccgaaaaaacgcccctctgtcttaatcaatcattcatcagttggcagtcgattctcgctgtgccatacagttctcgcgcgaaatagcgcaaatttcccgaaacttcgggacgtgtgaaaacaaaagcgtatgggacaacgctcatcacgatgacagaaaaaactaccgggttatcccgtcgagcactcctaaaggcatttgcggccacaacagtcgcagcagccccaacctacacacaggcagccggcttcctccgtggagggggcgacatccggcgcattcgtatgtactccggtcgcacaggcgagcgcttggacatgatctattggatcgatggcaagtacatcaaggacgcggtgaaagagatcaatcacttcatgcgcgactggcgcaatgatcaggtcaaggcgatcgacctgcgcacaattgacatcatggcggcctcgtcgaaccttcttgaagtgaacgaaccctacctgctgctctccggctaccggagcccgcagaccaatgcgatgctgcgcagccgctcgcgtggtgtggccaagaactcgcttcacatgaagggtcaggctgcagacctgcgtctgtctacccgtacagtcagccagatggcgcaagccgctcaggcctgcaaagcgggtggcgtcgggcgctactatggctcgaacttcgtacacatggactgcggcgtggtccgtagctggcgcggctaacagcgccccatccgattgcaatcggagcctcgctgcacgcgcagcgtggtcctgaacctgtgtcaggcatgacagggccctgcccaagctctcacatgtcctgcgcgctgttcgcggcagattttgttgcatgcgctgcggaactcattgatcattcactggaaattcaatgaatgatcagagacggtgatttttcgattgcagtggttttcacagccgcgtatatcgcgcagacagacgcacctgtagctcagctggatagagcgctgccctccgaaggcagaggccagaggttcgaatcctctcaggtgcgccatttctcctttgtcccaagagagttgctttgctcagatcgtgcatgttcgcatgcatcaactctactctcgcgcgcctgacaatcccaaggcaccgccgcacaaggcgcacaacgcgaccgatcctgtccgcgggctctttggtgaaggcttccccgaagaccacataaagcgttacaatagcgcaatatcgtcctttgcgcctgctgtgttaacctttgcttgaccactcctgcgcaggctttccaatgcaagcctcaatgagatgtcttgcgcgccgctcacataggttctcggacattgaccagctccgccagaaagtcgatcagcgcaaaggtgcgcaaaattgccgtgatcgtggccgttgcagcggtgacgtccctcaccttggccagcgccttggtcacccgaaaccttgaattgcagcatgccaacattctaacacgggaaacggccgacaaaatcagccgcgcgagtgcggatgccaccgcggccatcattaccgacgccgaaatccttgcgaatatgcccccggtcgctgcattgatcagggcgcattacaataatgggatcgatccagtgagtggcgataccaccgaggaatggaaagaacggctgacaacgattttctcctcgtttcacgcgcttcgcccgaattacctgcaaatccgctttgtcggctttgcggacaacgctcaggagatcctgcgtgttgacaaagtcggggaacggatagagcgggttcctgatcaccggctccagcaaaagggaaacgaaccctatgtcgaggctgcgaggacggttcccatcggtcaggcagtaccgctgcctccctcctacaaccgcgaaaatggcatcatccaggaacccaaaaccctgatgtatcgggtgcttgtgcccgtgttggaaccggcaggctacaaattcgagggtcatagatttggctttatcgttatcaacgtcgacctgttgaaacataaccaagccgcgtacaagccgctcaatctggcatcaagtttcgtcatacacaactccaaggggagcagctacgtctgggatgcagaggcgcaatcgggacagtatcacggcggcatggtcgttggattgccagaaatcgtgcgcaccgacctatcccgggccaatgcagagcagccgctccggctcgtgaacgagggcgcggaatacatcaccctcaagctcgagagcgtgagctcagccacacacagcgtatttctcacactgatcaaggagcggcatttcttttccaatatactgccgttcagcacactcaatctcatcgtcttggggcttttgctcattttctgcagctacgcctttgcgagacgcggcattgaaacggcactggcgccaatgcaaaccatgcgcggcaatattctcgcatcggcagaaaccgggcaggatcccgttctccccatccatcttgaggatgaggtcggcgatctcgcgcaatccttcaaaggtctgatcacccgcctgcgcagccaggaatccgacgctcgccaagtctttgacggcaccaccgatggcatggttctggtcacctccaatggcctgatacagcagtccaacgcggcctttggtgcattgtttggcccggtcgtcatgggggagagcaccctaacggactacttcgcctcaggggacgcccaggcgattgaggccaaagtcaaacttctggcctccggcaacgccggaaaacattttgcggaggccgtattatgccgcggcaaaagagacgcaaaagatggcagctcgaactggttcgaagtcaccctcgccctgctcagggaggccgagcaaaaactggcgctggtggtgatccgggacgtgacggaacgcgaggcgatgtcgaaatctcaaaaggacctgatcgagcagctcaaccggtccaacaaggatctcgaggaatttgcatatgtggcctcgcatgatctgaaagccccgctgagagcagtctctcacgccgctacctggcttgaggaggatctcgaggaacatcttacagaggaaaccacagagcatcttcactacatgaaatcccgcatcctgcggatgtctggcttgctggacgatctgcttgcgcactccaagattgggacaagggattttgatccaaaatccaacatcatgtccggtttggatctgtcgcataacattgccgatctttgcggctccggccaggatactcagctcgagttttcgcaggacttccttgctgcgcagatgaaccagatgccgttgcaggtcgttttgctcaatctggtgtccaatgccttcaagcacaatgacaaggcacagggccatgttctcgtggcgctcaaggatcaaggcgatcacttcgagatttcagtcaaggacaatggccccggcattcacccgaaattccaggaggctatctttggcctgttccgcaccctgaaatccaaggacgaagtcgagggcagcgggatgggtctcgcctttgtcgccaagcacctcgcggtccttggtcagtcgatcaaagtgatttcagaaggcgatggcaacggtgcggagttcgttttcacctggccaaaaccaaatttggaggaggtacaaaatgttgcatgaaaacgcgatggagggtttgcagaaggcaaatatccttctcgttgaggacgatgattttgaggcaaaggccgtgcgccgcgcatttcacaaagcccgcatcaagaacgaaatcgtgcgcgccgtgaacggggaagaggctctggccatccttgagaacacacacccgcatattcacgtgccgacgccactcatcgcactcatcgacatcaatatgccgaaaatgaccgggctcgaattggttgagatcattcgatcaaagcctgccttgcagaatttaatctgcttcatgctcacgacctcccgagatcccggagacatccatcaggcctatagcagccatgtggcgggctatgtcgtcaaagaaaccgcaggccaggatttcacacggctgctctcccttctggacgattactggatcaccgtggaactgcccgatacgcccaggcactgatactgtgcgccgaatttcgcgcgctgacgggttggcggtttagccgacgaaggcgccccgtgacggggccactcgaaacgctgcaggagcttgcgacctcgcccttcaggccgaggagcacgagagcacgagagcacgagagcacgagagcacgagagcacgagagcacgagagcacgagagcacgagagcacgagagcacgatcactcgactgcttgagtaatcaagtggaggcccttagccaacgggttgaaccactcgaatacgcacgcattgctatcgtggcaagcatcaacacgtatccgacatagaggctccattccccggctctcggatcattcaattccgaccacggcgcagagaatgtgcggagcgaacctcaatcctctgcggcgatgcatctttggtaaaagaactatctgcgcgcgctaggcgagatcgcgcagggattgcgccatcagcgcataaccatcataggcatagtcctgatacatctgctcataccaagttgcccaggcttcgcgctgttcttccggaaaggtatcagaccaggtgcctttgctcaccacgatctgtccgtcctcggcgcggcgcacttcgatcttgttcgcgatcataacatcccgctccaacctattggttttgagccatgtttaaccgcgcaggttcaaaaatccaagcacgcgctcagctcgcgaggcgcgacgtgccaaaagtgggctgcaatgcggcgtccaggcgggattcgatccttttgattgtatcggtccgcagatcgcgtttgatcgccgcataagcctccgccggcagttgcgccatacgtcgggcctctttcagggcgtaaccgtgcagatcctcaaggtcatctgccaagacttcgatgaactgcgcgttgcgggccgcaatcggaccgaggcgctgtccagtgagcatcaagcgtcgctgggtgttggtatcaagcgtcgcgcgggcaatctccatcaaggcggcgggataggcacgtcccaactgtacgtcgatcagctcaaatccggcccgcgcgtgggcgacccgcaggtcgctggccaatacaaaaaacatgcccgccccggagctcaggccgacagaagcaacgacaacaggcttggggaaggcatagagcgccagaaatgcagcgttgaggtcaccttccagcgcgctgacatccttaagttcaggatctacgccggtcgaaaaatccttgaacgggctggtcaacagcacggacctcacgtcagaatcagaacgcatctcattgatttcttgcgcaaaatccttcagaaaagctgacgtgagctggttttgaggcgcatgccccaactgtagctcgaccacgccgtcaccatgcagccgacggttgatccattcctcgcgttccataagtcccccaaattcaaattcttggcaccgcagataactctgcagaaaacccaccatggccgagtctggagagggaggtttgctattgtgttaccagcctcagccgatccgcgcgcaattctaatcgtattggagccatcaccctggtgggccgcattggcgctttgcgacctcatcagcagaagatttcctccaaagcggcaacccgcagttgaatgcccggtcattttgcgcaaggtttgtgcaaacacgtctggggatcagggggctgcctttgcaaaaccaaagggatgccacgtcgctttaaatgactgcggcaagaccgagtttcacacaggtgacgcccctcacgcatcaggttttcgcaacctgaaccaacggtttgggtcaacgggggcaccaaaaggcgacatgaacacgcgcgataaactgaattggcagaacgagctcgcagctggcaccgccacagtctgctttgatcccgaaacgccgcgatttcatgatcggcgcctctggacgccgcatgcactatgcctcaatgctcgaacagtcccgtgtcccgcatggaagctggagactcagacatgaccctgtctgagtatttgcaacaactgacccagttcaaaaccatcgaggagttgtggcgcgcgcatgtccaacaaatgagccgctatggttttgatcgcctgctctatggctacacgctgttcaagacacgcacctcgttgggggatccggatgattttgtgatcctgaccaaccattgcccagagtatctgcagggctttcttgccgatgggctatacgcacatgcgccgatgctgacctgggccttggagaacgagggccatgcaagctggcgcgtgtcgcaggagatggccgcgcaggggctcttggacaaacaggcccgcaaagtgcaggacttcaatcaatccatgggcgtgcatgccgggtatacgatcagcttcaactccgcctcagagcgcttcaagggggcgatctcactggcggcgcgcgcggacctcgatcaggatggaatcgatcagatctgggccgagcatggcgcggacatcgtgttgatgaacaatgtggcgcatctcaagattctgaccctgccctaccacgcaccgaaacgcggcctgaccaagcgacagcgcgaggtgctgcaatgggtgggcgacggcaaaaccactcaggacatcgcgctcctgatggggctgacgcccgcgacgatcgaaaagcacctccgtctggcacgcgcgacactgagtgttgaaacaacggcccaggctgtgctgaaggcggcattgcacaatcaaatgtatgcggtcgagcattaaaacgcagccctcaaagtgcattgaaacgcccaacacggtgccgggagtacccgttaaaacgctacattttcatgacgtttccatgtgactttcatgcagtaagcccctcaaatggtatggaaaagcagactttacggaatcttatcggcggctcagactaaggatgttccgtgagtggtggcttagcctgggaacttcaggaaacgatccctgatattacaagggctctctgacctgtccggcctgtcagcgtgtatttttccgcgctgatggccggagcttcagcttgcaacgcagacacaatgcagaacgcgctctttcactagaagcggaatgcgtcaaagcctgcatcgatgccgcgacgacacctgccaaaaacgcacagatcaaatagaaaaacccccgcaaccataaggttacgggggtctcttcaacacttattcagacgggcaatcagccctgagcggcctttgccacttctgctgcgaagtcttctttttcgacttcgatgccttcgccaacctcaacgcggatgaagccggtgacggttgcgcctgcttctttcgctgccgcttccacggtcaggtcggggttcaccacgaactgctggttcagcagtgtggattcagcaacgaatttcttcatgcggccttcgatcatcttctcgatgacctgctcgggcttgccggactcgcgcgcgatgtcgatctgaacctgacgctctttttcaacgatcgccggatcaaggtctgcctcggagagagccgccgggttcacagctgcgatgtgcatcgctacctgcttgccgatcgcttcgtcaccacccgagagcgcaacgagaacgccgattttgcccatgccgtcggtggcagcgttgtgcacgtaggacacaacggtctcaccttcgagcttcgccatgcgacgcagggtcatgttctcgccgatggtggcgatcttgtcggtcagggtggtggcaacggttttgccgcccagatccgcctctgccagctcttcaacggtgttcacggacagggctgctttggcgatgccagcaaccatggtctggaactcgccgtttttcgcgacgaagtcggtttcggagttcacctcaacagcaacacctttgccgccgtcgacgacaactgccacgagaccttctgcggcggtacggccggatttcttggccgctttggcgaggcccttggtgcgcagccagtcaacagcggcttccatgtcgccgtcgttttcgaccagtgcttttttcgcgtccatcatgcctgcgccggtggattcgcgcagttctttcaccattgctgcagtgattgccatcttaggctctcctcaagtcaaatgcggtttggggcaggtctaccctgccccacatgtcaattcgatgacacgctgtcggatcaggcgccggctgcttcttcagcgacggcttcttcgacaggtgcctcttccagagcaccgaggtcaacaccggcagcgccgagctgcgcggacatgccgtccagtgctgcacgggcaaccagatcgcagtagagcgaaatcgcgcgcgccgcgtcatcgttgccggggatgatgtagtctacaccatcgggcgagcagttggtatcgacaacagccacaaccgggatacccagtttgttggcttcggcgattgccagcgcttcttttttcacgtcgatgacgaacagcaggtccggaacgccgcccatgtcgcggataccgccgagggacgcttgcagcttctcctggtcacgctccatgcccagacgctctttcttggtcaggccttcggcaccagcagccatgcgctcgtcgatctctttcagacggttgatcgactgggatacggttttccagttggtcagcgtgccgccgagccaacggtggttcatgtagtactgcgcggatttctctgcggcttcggcgatcggcgctgcggcctgacgcttggtgccaacaaacagaacgcggccgcctttggcgacggtgtcacggatcgcggtcagagcctggtccagcatcggaacagtctgggtgaggtccatgatgtggatgccgttgcgcgcgccgtagatgaagggcgacatgcgcgggttccagcgctgagtctggtgaccaaagtgaacgccagcttcgagcagctgacgcatggtgaactcgggaagagccatgctattctttcctttccggttttatcctcagcgggggttcagacaggaatgtgtccaaccggcggtctgtcagggatgtctcccctgaacaggccaaaccccgcctgcgggttcgatggagcgcgtataaggcaggttttcctgttgcgcaagcgcaaaagcgcacggctcaggggtgatctttggctaccgcgtcgaccaccagaggcagcgcagaggcatgtccgtcgcgcaccacttcttcgcaataggccgccaacgccttgcgatcggcaaaatccgccacccgaaccggcggatgataaaggatctccaccccgccctgtggctgcgccgcaagcacttttagaagatgcgagccaaagtccatgtcgccccaccagccataaaaccggcgctcggcgcctttgggggcatcaaagacaaccgagacaggctgcacatgcatctcttcacgcagatcatcttcaaagagggaggcaaacagcgtggtcttgaacggcaagaccctcagcccgtcggtagaggtgccttcgggaaaaaacaacagcttgtgcccggccttgaggcgtgcggcaaacagcgccttttgctcttgggccttggctcggttgcgttcgatgaacacggtccccgtcgcccgcgccagccagccgatgccgggccagcccgcgacctcggactttgaaacaaaataaatccgcttcttggcgttcagcgcaaaaatgtcgagccaggacgaatggttcgccaccacaattcccggtgcgcgcatgctgcggccacgggtgtgaaaccgcatgccaagaatgcgaaaggcgttgcggcacacaaacacggtgatgaacggcgtcagcggtctctgaaccccaaaaagcgggcgctcaacgagacggaccatcagcaacagcgccagacagccaaaaacaagcaccgcaagcgcactgccccgcagcaccaccctgccccaaccaagcgccgtgatccgggtcttctcggggggcgtctcgctctgccagctgacactcatgcagaggcggttccgcgggtatagatgctcttctggcgcgcgttcatgcgcgcggtgtcgaggatcagacagacatccgtggtgttgaaatcatgatccacataagcgccgtcgccaacaaacccgccgagccgcagatacgccttgatgagcgcaggcgtctccagcatcgccttgcggcggtcgatctgatcttcgggcaatacattcattggctgataagcctttgaacgaacgcgtaattcttcaggcgcgagatgattggcatgcagcatggacagaggttgcgccagatccatggcatcggtgccatgaaaggacgccaccccaaagagcacttcgatttcatgttcggccacataagccgcaagcccgttccagaggtgaaacatcgccatgccaccgcgatactgcgcatggaggcaggagcgccccaactccaaaagtttgcgccccgaagcccgcaagggcgcaagatcatattcatcctcggaataaaaccgccctaaacgctcggcctgatccccccggagcaaccggtagacgccaaccacctcgcccgaggtgtcgtcgctcaccagcatatgatcgaaataagggtcgaactggtcgcgctccagcccggcttcgtgatccaccagagccccgcatccgcccagctcgcgcacaaagacctcgtagcgcagcgcctgcgcggcgcgtaggtcctcgtcggtctttgccatcctcacggaaaactgtggcgcgccatcgtgcatggttcagctctacccttgatttgtcgcgggcaatagcccatcggcatattcgtgcgcaagaaatatgcacacttgtctatgattggttaacctttcataaaccgtttttacggatcaaagacaggaacaagggcaatacgcgcgccgtcaaagacgactttgccctggtcgggaaaattgacagtgatcttaccgcccacgtttgactgtacctgccccagcccccaatccgggtggtcgggatgacggacaaacatgccgggtgccaggatcgcattcaggtcattcatcgcttgggtggccctattggaggaaagttatgagtgtagataacgccaatctggccgcattggtaggctcacgcatatgtcacgacctgatcagcccggtgggcgcgatcaacaacggtctggaattgctcggcatgtccaattcgctcgaggggccggagcttgaactgatttcggacagtgtgaacaatgccaacgcccgcattcgtttctttcgtgtcgcttttggcgccgccggcgaacaagagctgggccggatggaaatcatgagcgtgctgagcgacgtcagcaaaggcgggcggatcaaatacaactggtcgtctcaggactcggctgcgcgccgcgatgtacgaatggcgtttctggcggggctctgtctcgaaagcgcgctgccctatggcggcactgtccagatcctgcgcagcaccgacggctggaccgtcaccggcgaagggcgcaaaatcaacttggacgagacgctctggtctggtctggtggcagacaccacacctgcggaaatcacgccagcactggtgcaatttgcactgctgcccgccgcggccaaagaagccggctacacgctggccttcaaccagactgcggagaagatctcgatcagcttctaatcatgtcgccatacctatgaaaaacgccgctgatctctcagcggcgtttttgcgtttcagcaaggcgtcacatccgtcacgcaggtcaggcgcgcacggtgccgtcaccgcgcacgagatatttgaaactcgtcagctgcgtcgccccaaccggtccgcgcgcgtgcatcttgcccgttgcaatgccaatctctgctcccatgccaaactcgccgccatcggcaaactgggtggaggcgttgtgcatcaggatcgcgctgtcgagctcagagaaaaactgcgccacggcagcatcattctcggtaatgatgcaatcggtatgggccgaatgatacctgcggatatgggcaattgcctcgtcgatgcttgccacttttttggcggcgataatcgcgtcgagatattctttaccccaatcctcggacgtggcgacctgcatgctgtcagggccgggcagcccctcttcggcatggatttcgaccccgcccatggcaagcagatccagcacatccttgccgatgctgtcggcaatgtcctcgtggatcagcagacactccgccgcgccacagatgccggtacgccgggtcttggcgttcaagaccacgtcgattgcctttttacgatcggcatctttgtcgaggtagatatgcacgatcccttcgaggtgcgcaaagaccggcacccgggcctcgcgctgcaccagccccaccagccctttgccaccgcgcggaacgatcacatccacatacgcggtcatcgtcaggagctcctgcaccgccgcacgatcgcgggtcggcaccagttgcaccgcatcctcgggcagatctgcagcgcgcaatcccgccgcaagacagccatggatcgcctgcgcggaatgcaggctctcggagccgccgcgcaggatcaccgcgttgccggatttcagacacagcgcgcctgcgtctgcggtaacattgggacggctctcatagatcacaccaatgacacccagcggcgtgcgcacgcgctgaatgcgcaaaccgctgggctgtgtccattcgtccaggacggcgccgaccgggtccgcctgcgcagccacggcgcgcaacccgtccacgatgccctgaatacgggcttcatccagcatcaagcgatccatcatcgccgaggacaagcccttgtcgcgcccgaactccaggtccttggcattggcggcaatgatctcgccgcgctgggcccagaccgcatcggcggccgcgttgagcgcctgctccttttgcgccgccgaggctgtcgcaagctgttgcgcagccgctttggcgcgcttgccgatgtcttccatcagcgcgggaatattttccagatctttcatgtctttgcccttttcttccccaggcggggtgcgagccataccgccacatcacgcgccggcaggacgtcttcttagcgccagaatgacaggatcaaagcgccatgtcatcccggtggatcagggccgcacgtccagcatagccgaggatcgcctcgatctcatccgaacgatgtccctgaagggcgcgggcttcctcggccgtgtagcggctcagcccctgccccagcttacggccatctgggccgaggatggccagcggatctccgcggccaaagtcaccctccacatgacgcacccctgcgggcagcagactgtttccgttgtgcagcgccttggccgcaccttcatccacggtgatcacgccgcgggttttcatcgcggcgatccagcgtttgcgcgcgacctgcgggtcaccttgggctgtgaaccacgtcgaagcagccccagcctcaagtgccgaaaccggcgacatcaccgatccttcggagattgccatggcgcagcctgcggcggtggccatcttggccgccaagagcttggtgatcatgccgcctttggacagccccgagaccccatcgcccgccattgcctcgatctcgggcgtgatctgttcgatccggtcaaaccgtttggcgtctggatcaagcgcaggattggcgctgtagaacccgtccacatccgacaacaggatcagcacatcggcccccaccgtcaccgcgacctgggccgccagacggtcgttgtcgccatagcggatctcgtcggtggcgatggtatcgttctcattgacgatgggcaccgcgcccagaccgatcaaagtctcgagcgtggcgcgggaattgaggtaacggcggcggttttcgctgtcctccagcgttacaagcacctgcgccgtggtgatcccatgcggcgccagggcctcctcataagcgcgcgcaagccggatctggcccacagctgcggcggcctgtgactgttcaagcggcagatccttgcgcggcaggcccagggcaccgcgccccagcgcaatcgagcccgaggacacgaggatcacatccttgccctgttttttcaggcgggccacatcctctgccagcgacaggagccactcctgccgcaaggcactgctggtgcgatccaccaaaagggcggagccgatcttgatgacgacgcgccgcgccgtgcttagggctgccaaggggtgtcctcctcctcggacgcctccgcctgtttgatccgaaggcggtcatcatcgatctcggcgcgcaccgcacgcaggaccagatccagaccttcccggctcacgctcgacatcatcagaaccggcgctcccacctcggcctcaagcgcagcacgcgcctcggcccgttcctcgtcatccagcgcgtcaatcttgttgagcgcggtgacacggggcttgctcgcaagctctccgccataggcttcgagttcgttgatgatggtgcggtaatcctcggccaccgtttcagaggtgccatcaaccaggtggagcagcacagcgcaacgctccacatggcccaggaaacgatccccgatgccacggccttcgtgcgccccctcgatgaggcccggaatatccgccatcacaaattcggtattgtcgatgcccaccaccccgagattcgggtgcaatgtggtgaaaggatagtcggcgatcttgggtcgcgcgttggaggtcgacgacaggaacgtcgatttgcccgcattcggcagacccaatagacccgcatccgcaatcagcttcaggcgcagccagatggtgcgttcgacaccctcctgaccggaattcgcgcgccggggcgcctggttggtagaggatttgaagtgcaggttcccaaagccgccattgccgcctttggccagcagcacgcgttcgcccacatgggtcagatccgccagaaccgtctcttcgtcctcatcgaggatctcggtgcccacaggcacccgcagcacgatctcgtcaccgtccttgccggagcgctggcgccccatgccggactggccgtttttggcaaagaaatgctgctgatagcgaaaatcgatgagcgtgttgaggccatccacggcctccgcccagaccgagccgcccttgccgccgtcaccgccatcggggccgccgtattcgatgaatttttcgcgccgaaaactgacgcaaccgttcccgccggcgccggagcgaatatagacctttgccagatcgaggaatttcatgagtaggcctctgtgttcgagttggatcgccaatacttgaattcaggggatggctcaaccctgcgtctttggatctgaggagatcccgttccatgcccaagctgcgcagcccggcataaaaacgcggacccgcccggtggcgcgcccgcgatgataccgcctgctgcctgtcggttacagctttcggctgtaggtccatgttgggacattggcatcccgtgcgacgctgaaatcttctgcgtcaccaaggtattcaaagccgcaatgcgccagtacccgcgccgaggccgggttgtcctgaaacacacttgcaaacatggtggcatcacccagagggttcgcctcgaccagaagctgtaccgccatggacgcaaggcccgtattccagaacgctggcgccacccaatagccaacctcggactggttgcggtccatggacttcagcgagatcacacccatgagttcaggattgccgtctttcgtgccatccatcgcccagatgaactctccctgctctgcctcgatgccgcgtttgacataggcttcggccgcgccggggggatacggatgcgggatcggtgcggtcatctttgcgatgcgcgcatctcctgcgtaatgttcgatcaatcccacatccgacggacgcaagggccgcagatcaaaacgatccgcctcgatgatggcttgctgatctgtctgatccaaacccataacgacgctcctcctcaagaaactctgacctcgataatacacttggctttccggggcttatctcctctgccccgcgccaaagagatggggagtgcacaggctacaaacaagtcacccctgcacgcacacccagctagatccagcaggcccatccagaaacgaaaagagggaccggtcttttaaccgatccccctaaagattttattaccctttgggtccggtttactcagcggcctccgccgccgggagaaccgaaataaaggtgcggcctttgaggcccttgtggaaggtcacgttgccgttggcggtcgcaaagatggtgtgatctttgccaataccaacgccttcgcccggccagaacttggtgccgcgctgacgcacgatgatgttgcccgcgattgcagactgaccaccataaagtttcacgccaagacggcgacctgcggagtcgcgaccgttacgggacgaaccgccagcttttttatgtgccattcttgtctctccttagccttgagccagctctttggcctgctcaacccattcgggtttgatcttgatggcgtcgataccagcaatgtcgtcttcagacaaggctgcgatctgagcgaaggtggtgaggccagcggcctccagcttcttggcggcggcagggccaacaccggtcagctgggtcagatcgtcggagcctgcggctgcaggtgcagcagctttggctttcggcgccgctttggcagcaggagccgcctcgcctttgccggttgccgctttcacgccggatgcatccgcaccagaagccaggatctcggtgatcttgaccagggtcagcttctgacggtgaccgacagtccgcttggaggagtgcttacggcgacgcttgacgaacttgatgaccttgtcacctttgatctgttcgaccacttccgcctgcacggcagcgccggacacaaacggagcaccaacgacgggggcatcgccaccgatcatcagaacgtcattgaattggacggtttcgccagcgtctgcagccagtttctcaacgcggagcatatcgcccgcctgaactttgtactgcttgccgccagtcttgaggactgcgaacatttcagtctttccttttctcaccgcgtccttcggtccccttgcgggcgtttgcgacagggcttggcccgtgtcacctcgaacagcgcgcccctatcgggacggtatgacaataaaaccccggcgcggggattccgggccgggatgcgggcttttggacctgaacaaagtcaaagtcaagccttcgtctgcactcggcaaagatttatccacagacggacatcacccaacacctgctacggggccgttggatgctcagagttcctgcacgggctgcagatccgacatccgatgcgccagttcctcaaagcggttggcctggatctcatattggatcgcgttcaagagttcatagacttcctgcatcagcggatgctccagcgcctcgacataggcctcgacctcttcgatggtgaagtcacgatagatataggccgattgcgcaaggcttgatgcggccatctcgcgtcgcatctcgccttcttgcgccttcatcaaggcacgcagcccatcggcgtcgatccgcatctcgatcaccccggcagccgaggcggccatcaagaaccgaaactggatttcctgcaccgcgcgcaacgcggtctcggtgccgccgatggcgacgttcatgtcccggtagagcgcaacgcgcgggtcgccctcttccaccagcttgctgacgatgcgctcccctgcctccagcgtgccgccatcttcgttcatgtgagacgcgttctccaccgctaccagccgttgtccaaggtcactcgcatagaactcggcggcaaagaaaagtgcctcggcagagagggtttgctcaagaatatcaagcgcggtatcgcgcatcttctgggtgtcaaatacttcagccgtcaggctttcccaagccaggccaaaatcccccgcatccgccccgaggatcttgggcgcgtcgcttgccgattccgcaatactgtcaagcgccacatcaaaaccggtaatttcaaggaaggctttgacctgatcacgatcggcggcctcggtttttgagggcagcgcaatcacaacagcaaaggctgcggcaaagaggccgttgagcaggacagtgacaaatgcggcggggcgcagcggcgcgggaagcgaacggatcatacaataaatgtagaagcacaattgcgttcagcaaaccaaaattcgactttcttgaacgaactgtgaaatcgccccttgcacgcggagaaaatcacctttaaacgccctcacaccccccgcggagaggtgccggagtggtcgaacggggcggtctcgaaaaccgttgtgccttcacgggcacccagggttcgaatccctgtctctccgccacttattccttcaaaatcaagtgtgaactgctgaccataccccggcgcaataggcgctcgtgcgggatctgtctcgggccggttcaaacctacctgcgcgcggcactgtggagtgaccggaacagcgcatgctttcgagcatgctgatacgtctggacgtcaatggctcagcctctcaggccggaaacgcgccccttgatgacgtagagttgatcggcagcaatccgaaattcaagccacttgggccgaacacgcggatgctgtgaccacagactcagcgtgggatcttggatgcgcgaagcgggccacaagatcctccagcacacctgcggcagtgaacctcgagagggcctgcgcctcatggcccataccagatcgcgcgatgtgcatgtggtggatgaccgatgcaccaagtgggcgcgtctcgacattcaaatgcggcaggcttgccccgtcacggtcgctccaaaggtcctcttcccaggcgctcaggagcacaatcatcttccccatgagcatggcattgcgggcgtaccgccgcccaaaaggcccagaggcgcggcgtgattgggcctgcgccacgtgatcacaccattccgtcaatgcagcgggcacaccatcaacgcccagaggcgcggtgatgacgatgacctcggctgcatcgacctctgcatatatccctgcagacaacctctttcgatggttgcacgggatgtattgttttttggccgtatcaaaacacaggcgcggatcatgcaatcccccaggggcacttggcgaaggacacccaatgtcgcgcgcgataagccgcatatcactgcgtcggttgatccattcttcgatgaaccgatctcccagatgacgagagtacgccccttttacacgggggctggtatcaaggcgcagaatcagggtcatggcgatggttctcctcaaggcaggaaatcaacaaaagcgaagcggccaaaacacgcttacccagaaaggaaagtgacgccgcctgtggacaggacgtcgatcaaggataggcccggctctgcgggacaggcatagagccgggcctcaggtggtgcggccatcgcggaggcgccgacggccgcgaccggtccgagcacttagggccttgacgcacggcaatggggcaccgggcgcgtcatgcccatccgctcggggggcaatcgcagtcagaactgcggttaaggctggggggtagcgcatcggtcagcatgggccagaggggaggctccgacgccgcaccacgcgccattcaagccgcagatcaggccgactgacgcgcgtcctccacaggggttatgcgaccaaagtcgccaatcgggtccgcaatgaggcggccctgcatcgtgaatggcagagcgaggagcccggtcaaaagcgccgctgcaactgcgagcaggagcatctgcgtcatctcgcccagccggatctgtggccaggcgggcaagccagaccagcggctgccgcgtggcttttgcgggattgggtgtgtcggggatgtttcggtcatagtatgggcctcctgggatgtcagagaggccttgccgggttgtgaacatcacccgacctctctggggtcgatgaccttacgttaggctcggtgggaccttcgggtattggcaggacctgccaagcgcatggccggacctgccaagcgtccgtaaatgccgtagcagccccctgagttgagagggtttcaattgggcgcgagcatcgcgtgcctgatagaccgccggggccagaggccgcgtgcactatacgcgagcaatcgcgatcagggcgatgggaactgctgtcgaaactgcgctggcgcttgcccgacccagcgcttgaaggcacggctaaaggtgctctgctccgaaaacccggtcaaaaaggcgatctccgcgatcgagctgcggctgtctttcaaaagctcctgcgccagagacgactgagcttcggtcagcacgtcgcgaaacgtaagcccctcgtccgcaaggcgccggtagagcgtgcgctcgctcatgcccatctcgcgggccacatctgcggcctgcggcaccccgttactgagcgcaggcgtcaacagtcgcaaaagccccgcacgtaccgaggtttcatcctgtagcgtgcctatctcggtctctaagtgcgtggtcagaaagtccgaaaccgccgcatcgcccaaccggtttggcagatcaagcatctctttgcgcagcgcgatgacgttttgctccgcatcaaagcggacggaacagccaaaatgcgcctggtactgctctggatcgctgcggcaggcatgtctgaaggtgacatagtccagaaccagatccccctcgacaaacagacgcatattccgtgccaatccggcaaaggcgccctcgttgcgaaaatccagcacaggatgatgccccgtgcgcgcctcaaagatcaagagcgccggatcttgggaggtgtccagtcgatagatcgcagtatccgtgacaacctgccaataccgttccaaacgttcgagcgatgcccgcagggttggcgcggttttcatcgcaaggcccagcacaccaatatcatccgcccggatcagtttggcataggccgcaagcagtgccatctcgtccttttgctggaaccggatccaatccagaagatcgaaataatcggtctcagagagtttgccatcagcaggtttgggaagtcggcgcaccacagtaccgccagagatcagctctccatcgtcggtcagcgtcatcccgcccgcttgggccatggcgcgcgcaaaagcattggtcacggttggcatgcgccaaactaatctgaaacatatctcaagcgctagttattcaccgtgatttttgcaggcgctgcgcgattatcctcgctgttcgcgctcacatgcgtcccctttgtctcaacatttgccgactgttgggcgcgcgcaccgcgacggaacgaaaggtcccgttcagattcaatgtttcacggagccgcgggccgcctgtctgcggcccgcggtattggtccggctcgaccctgatgtttgacgctatgacgggttggcgatgtcaaaggtctcgattgagacctcgaccccgccaagctccgccttgaagtccgccatatgggctgtttgaccatgggcctcgagcgcggcggcgctctgccatttctcgacaatcacgatcgtaccagcctgatcgacatcgagcatcgggcggtaggacaggcagccgggctctgccctgctgtgcgctgcgagggtctggacgaactccaacagcgtgtcccgccgctcataagcggtcttcagctctgcgattaccaaaacggccattgcggcctcctcttatgatccattctcatcacattggccggtctgcatggcgcccaatcgtgcccaaagcggctgcagagtcgcgttgagctccgagtagagcgcgtagcgctggtcgtaatgccgtctcatcaatgggtttggggtgaactcggccttggtacgggtcatccgcgccacggcgctctcatagtcctcggccagccccacggccaccgcgacgccgatggcggctcccaatgcgcctgtttccttggcctcggaaacacggatcttgcgatcaaggcaatcggcaaagatctgcggccaatgcgggctgcgcgagccgccccccgacagcaccgctgtgtcaaagtcgagccccgccccgcgcagcacctcgatatggcggcggtgctcgaatacgacgccctcaaaaagcgcgcgcagcaggtggccctcgccgtgccagcccgcaagaccaaaatagccgccccggaactgagcgccctgccccgacccgtagagaaagggctggcagatcggatcatccggcgcgggcgttacctcggccaccaaattgttgcattggccaaagggatcatcgacatgggcgccgcgctcgaccagttcgcgcacataccattcgaggttgaccgccgatgtggccgaggagtcgatgttcacaaagcgccccggcgcaaaaccggacgccatgaacaccgaagagtccaacaccggctctggcgaaaagacctgattgaccgaccaggttccggcgatgattgatgcctcccccgcgcgacagacaccggaccccagcgccgaagagatcacgtcaaagtagccgccaatcaccggcgtcccctcgatgagaccggtctgcgcggcagcagcggcggtcacatgacccgcgatctcggcaggttccacaagcgcgggcagcatcgaaagcgcatcctgaagcccgtagaggcgcatcaattcagcatcataacggcaggctggcatccgcgtcagaccacagccggacatatcggagatgtcactcacctttatacccgtcagctgatgggtgatgaaatccttgcagagcaacaccgttccgatccggtcatagatctcgggctgatgtcgcttgacccaggcgagcaacaccggcgtctgcgacggccagggtttctgcaggcagatcttgtgcaggtcggagccatgggtctcggataggtcttccgctagctctgcggcgcgggtatcaagcgactgaatgccaatcaaaggcgcgccagatttatccagcgcatagagcccgttgccatgccccgcgcacccaacgccagcgatctggcgggcggagatgccagcctcttcgatgcagccccggatcacctgacccgcgttctgccacaattcgcccaggtcgcgctccacatggcccggtgctggggtcgcggtctgcccatcgagcgcctgcatcgccacttgccgcccgtcttgatcgaacaacacggctttgatgaccgtattgcccgcatccagacccaagagatatgtctgttcctcacccacggttataaatgtcccatgcttcttcaccatccgcgccagagtggatcatggccatcaaggcattgaccacggcttttgggttctcatgctgatagatgttgcggccatagaccatgccttttgcaccctgacgcatcaaagcggcggatttgttcaacacggcgcgcagatcgtccttgccgccgccccgcacgagaaccggcacgcgcgccgcctcgaccacgcgataaaactcttctgggtcgtcggtgggatcggccttgatgatgtcggcccccatttcgctggcaagacgggtcagcgtcacgatcttttccgcatccccgtccacctgatagccaccgcgcacatcattgggcagcatcaccaagggctcgatcatcagtggcatgccgtatttttcacaggacgcccgcacccgagagatattctcgacgcattggcgaaagagttccggttcatcgggcagcatgaagaggttcaccaccaccgccgccgcatccatctcaagggcgccgatgatgggctcttcggcgttttgcagcattgaccacatcacgcggtggcgctgatcgttatagggattgcccatatcaatgcgcatcaccaacgccggtttgtctttttccgggcggctctgcaagaggtccgcctgaccataggcgcattggatggcatcggggcgggcgtcaatcagcgtgttcatcaccgctggcatgtcttcaagaccaaccatgaagctcggttcgttgcagacaccatggtcgatggccacgtccagacaaccaccgttgctaaacatccggttcatgcgggctttcatgctcatgcgcattgggcattcctttcggtatttcgacgttcaagagttgcggcggttacgccgtgataggtgctcagctctgcaatcagatcctgtttctgagccgtgatgagatcaggcgagagacccgtttcctgcgccatcagcgccgccagcgcctcgatgatctgcatcgagagcacgccagagatcgccagatccgtgcgccgaagggccagatccgatagggtttcgacaaactcgcttcggataaggtgcaggatctcgccctcggaatagagcgtccctgcggccagcgggcggtcctcgcgaccacaggcgattgcgaccttgggggcatggctgccgtagcgctgcaagagatgaccggcgcgggcgtggctgaggttttgtaccttgcaaagctcctgcaggatctgggcttctcgcccttcaaacttcgccccgcccccaatcgccagatccagcgtatcaacgcgccgaccgtgccgaagctccccgagcgctgcatctgccgtctgctgcgcaaaagcgcgaaaggtggtccatttgccaccgatcatgcagagctggggcaccctgccctccagtttgcgaatgtcgtggccgcgcgaaatccggccggtaaaatcctggtcgctctgcggcaagggccggattccggaatagctgaacacgatctgactggcgtcaatctgcagccccggaaacactttcgcgagcgcaccgaggatatagtcggtctcctccggctcgcagcgcacgcgtccggtgcgcgccacccgtatatcggtcgagcccgccagcacccgatcgtgaaacggaaacacgatacagacccgcccgtcatcgttttcaaagaagaccatattgcccttgagcgcggcaaaaagctccgggtgatccaaaatcagatgcgagcccttggtgccctccaccatccgcggcgccgtcccgccgagctgcgccacggtttcatccagccaggctcccgtggcgttgacaatgagccggggccgtatctctgcggtctgaccgctgcgctggcaggtcacactgaacccgccggtctccgctgcgatctcgcaataattgagcgcgacacagcccggcgccacccgcgccacatcctgaagcatttcgatacagagacgctctggaaacccgatccaggcatcatggtaggtcgcggtgccccgcgcctcctccatcagctcgggccagtcgcggcgggtggcgcggcgtccctgaaagctgtgccttggcatcaggcggcgtttgcggcttacccagtcataaaggctcagtcccagcttgatcggcaccgcaccacgcggcgctggtttgctgctcagcccccaaaaggacgccgccgcgttgaacagaccggaaaacagcgaggtcacggggataaccgtcggcagcggatgcacaaaatgcggcgcgttcaccaacagcgcatcgcgctcctgcaggctctcgcgcaccaggtcgaactcgccattctccagatatcgcaggccgccatggatcatccgcgacggcgccgcactacagccgctggcaaaatcgccccgctcgaccagaagaacgcgcaatccctgcaacgccaactcccggtaggtgccgatcccattgacgccaccgcccacgaccacgacgtcaaaggccccgtcaccagacaggctttgccagtttttcactcgttgatcgggcatatcttctccgtgcgctgacgaggtcgtcgcagcgttttgtgcatgtcatgtggtggcgtcagggcctgtgaatcagccgtcgaggtcgctgagatgcgtgctggcggcaccgcttatccgggcaatgtcatccgcgctgagacgcagcagacccgccttggcgttttcaactgcttgtgtcgcatcgcgcgccccgcagagcgagaaggttatccccggctgctgcagcgtccaggcgatcaccacctgggccttggtggcaccgtgtacttcggcaatgtgcgcgatggcctccatcaagcgggccactttttcgcgattggcaattgaaaaccgtgggttgtccttgcgctgatcgtcgccttcaaacacccggtcggggccgatcttgccggtcagaagccccagcgcgagcgaggaatagctgaggatggacaccccgttttcatgacagagcggcgccatctcggcctcaaccgcgcggttcaccatcgaatattcttcttgaaccgcatcaagctgtcccgcctcgagataggcacgcacgtccaaaggcgtggtattgctggcaccaatcgagcggattttgccctgtgttttcagctgctccagcgcctccatcgtttcggcaatcggcgtcgtgggatcctgccaatgggtgatgtagtgatcgatgtaatcggtgccgagacgcgtgaggctttgttcgacctcatagatgatcgcatccttgccaagatagcgatgcaccggcgcgccgtcgtaatcaaagaagtgattgcccttttgcgtgtgccagacgagcccgcatttcgtggccagcaccaccttgtcgcgacggtccttgatggccttgccgacgatctcctcggcgacgccctgaccataggcgggcgcggtgtcgatgaggctcactccggcctcaatcgaggcctgaatagcggcgatcgagcgcgcctcatccgtgccaccccacatccagccgccaatggcccaggtgccaagcccgatggccgaagcctcgatcccggagcggccgatctcacgtttcagcatttcatgcgacatattcagttccttcatatttctgcagcacttctgcggccgtgtcttcgtcaacgatgagcgagctcagaaacccgccttcaagcgccgcctcgatggggcgcaccttgctggcgcccgccgcgatcccgatcacgcgctcacattggcccagttcctgtggcgacagggccacgaggcgcgagttaagggcgaaattggccaccgcaccattgtcgcggatcagatggcccatgaactcgcccacaacaccggtgcccacaagcatcttgcgatcggcttccggcaccgggtggaggtcgtaatagcttgattccgctggctgcacggagccgatccccacaagcgccacattggcgcgacgggccagatcgagcacttccttgatggaggaaatatccatcagcatgtcgcgctgggccttgctttcggcaaagagcggcgcatgcagcagcatggtcttgccccccagacgttcagccaaccgggtggcgaggtggttaacgtcggtgaaatatttgccctgcaccccccctgtgagcggcacaacggtcacgtcccattgccgctccacatcaagtccatcgaccagggcgctcaccgccttgccaccggtaatcgcaatgacatcgccatcgcgcagcgtctcggtcaggtggctagccgcagcgcggccaacctgctgcagcgtcgctttttcgctgccctccacggtcggcgtcacaacggcgctgccgagattggcaaagcgggtgacggcctcctcaatgtccatgagccgctgaaacgggctctcgatctcgatcttcagcatgcccagcttgcgcccctgagagatcagccggttcaccttggatgtggagaggttcagttcggtcgcgatctccgactgtttcttgccctcgataaaatgaaggaccaaaacagtgtggatctggcggacggtttcgaacccttgtctgtgctcaaccatatccccctcagccccgcttcttgttgaggaagtggtcgattgtcaccgccgccagaaggatcgacccccggatgatgtcctgccagtagaccgacacatccaagagcgcgagcgaagacgacaccaccgacaacagcaccgtcccaaggatcgcgccaaagatggatcccgagccgccgttgaggctcgcaccgccgatcaccgcagcggcgatgacgttcagttccatcccgagtccaaaggtcggctgcgcagacccgaagcgcgccatgtagatgatcccggcgaacccacaaagcgcagagcaaagcgtcgtggtcaaaaacaccaccttcttggtgcggatgccggaataggcggcggccttctcgttggagccggtgtagaacaccttgcggaacatggtggtgcggcgcagcatgaaatccgcggcgatcaccaccacaacaaagaggatgatcacaaccggaatgggaccaatggtgccctgcccgatgaatttgaactctggcggcagcgtatagagcccgatgggccgcccgcccgtcgccaaaagacagatcccgcgtgcaatcaccatgacggcaagcgacacgataaaatggtgcagcccgatccgcgtggtaaagaaccccatgaacgacccgatggcggtacaggcaaaaatcgcaatcgctgcggccacccaggggtcaatcccctgcaggaacagccagcccgcgatcacccccgacagagccgtgaccgaccccaccgaaaggtcgatgccgccagaaatcagcaaaaccgtcatgcccacaaccacgatgccttcgacggcaaaggccatggtcatggcgcgaatattgacccatgtcagaaaatagggcgaggcaaaggacatgccgatgaaaagcgccaggataatcagaatgaggcccgtttcgcgcatccgcaagagccgccccaaaagcgattttcccctcgatgtttcggccagtgcgatgttcacagattgctccattgtctcccccttcattgcgccgcaaccgacgctgcacccgtgccttgctgagtgcccgaggcaaggtgcatgatgttttcttctgtcatgtccgggccactcacttcaccgctcagacacccttcgtggatcaccagcacgcgatcacacagaccgatcagttctggcagctcggatgaaataaccacaatgcctgcgccctcctcggccaaatcccgcaggatgcggtagatttcggcctttgcgccaacgtcaacgccacgcgtcggctcatccagaaagatcagtcgcgggttgaccgagagcatcttggccagtgctaccttttgttgattgccgcccgaaagcgacgaaaccggatcctgcagcgtgccgcatttgaggttgagcttgcgcccaagtcggtccgcctgctctatttccctgccaggctggatcaacccgagggcgctggccacctgttcgaccttcagcgccgaaacattgctggcgatggacatatccagaaacacgccgtcgcctttgcgatcctcggagagatacacaatccccgcatcaatgctgtcctgatagtcgcgcagcgccagcggctctccattgagccagagcctgccagtcacctgaccttcaagcgcgcagacccctttggcgatctcgctgcgccctgcaccgatcaacccggcaaagcccaggatctcgcccttatgcagcgaaaaggacacatcgtgaaaccgctcggcctcacaaaggttttcaacccggaggacctcggtcgtgctgcaggcctcgggacgttgtttttcgggatagagatcgccaatttcgcgccccaccatggcccggaccacatctgcaggcgtgattttggcgacatcctgtgtcgtcacatagcggccatcgcgaaacaccgagacccggtcgcaattgtcaaagatctcgaccatacgatgcgagatataaatcaacgaaatcccctgatccgccagccgccgcatgatcttgaacagcacctgcgcctccgcctcggtcagcgctgccgttggctcatccaggatcaacacccggcagtccagcgtcagcgccttggcgatctccacaagctgctggttcgaaatcgaaaggtcccggacgagcacagagggatcaatgctcgacaactgcgcaaaaacttcgcgcgctttggcttcgatccctttgtaatccatcagaaaagaccggcttgaattggtcgcagccataaagatgttttcagcgaccgagacatccggacagagtgcgatctcctgatgcacaaagccgatccccatcttttgcgccgctgccggagacggaatttcgacaggggtgccatcgagccggatttcaccgctgtcgggctgcaaaataccgtcgatgatgttcatcaacgtggacttcccggcgccgttctctccggcgattgcgtggatctcgccacggcggagttcgaaatccacgccctttagcgcctttaccggcccaaaggacttcgtgaggttcgaaatttgcaggatcacgtcgcctgtcatatcgctcgcccgtctcttctggaaaattgatctgtgggctgcccggcccctcaccgggcagccacatccgcgatgtccggatcagctgggatcgcgaccggccatataggcgttgagatcaaagctgtcggcgttctcttgcgtgatcacggcaaagccattgtcaacaaacgggatctgcaccgggttgtagccagagaccttgtagtcgttgaacggatcaaacacctcggattttgctgcgaggaagacccccatgaaccccataaagccctgcatgccctggttcgggttcaaagccgcatggatgttgcccgccttgatgtgctcaagcgtggtcggggtgatatcggcatgcatcaccatcacatcggactgcgcctcgagcttggccgcgacggcgccctctgccgatcctgcctctgggatccacagggccttcaggtccggattggcctgtatgatcgacgcggtggcgcgataggccgcgttgctgtcctggttggtggcctgacgccccaccagcttggcctccggataatgctcttccatgtaagacaggaatgcggtgacgcgcaggtcgtggttggactgacccgggttctcgagcactgcaaactcaaagctctcgcccagttctttgacaaattcctcggcggcaaacttggcctccgccatattgtcggaggtgatatagccagagcgcttggaattgggcgagtccgccgcaaaggtcacgatttcggtgccgttatcgatggcgcggttgatgggctcgatgaaggggtcagactgcatcggatgcaacagaatgcctgcgggtgccttcaccatatcctgctcaaaggacgcaatctgcttggtgatgtcataatcaggcgtgccggagaacacggtctcgcaaccaaaagcctctgcagcctgcttgaagccctgatagactggcacccaataaggatggctcgagaccatcacattcatgatataggtttcacccggctcgcatttgagcgttcccgcctccgccagagcggctccgggaaccgtggtcatggacgctgcggcgcagacggccacctgtttgaaattgaccataagttttcctcccttgtggtctttcaccttgccgcacggcgtctcctcccgccggactgcaataaatttcgcttgatgcaatgttttgcacaactctgatttagagaggaaaaatcccttggatcaatcatcgcgaaaaaaatcctgcaaactgaaatttattgcaggaatgcggtgtgccggagttatggcttgcggcagattttgcggcgcattcacacgcaagctctgagggcgcatgatgcgtttgcccaagcggaccaaatgcaaaaagccgagcgctgcgcccggctttttaaatattgtcaggtaattataaggcgtttctcacgcgcgacgacggcgaccgccaccgcgacgcccgcggccttcgccctcggcctcagaggacggcgccttgttgaacttgatccaatcgccgccatgcggatcgttgttggtcagcaggttcgcagcgcggatcgcttccatttccttgccggcgcgcggctttgtggagccaaggccaaacatcgtcacgaaagtctcgtcatccatgccctcgggcaggatgattcccgcggcagcgacttgctctttcttttcggcaatcgccttctgcgtcaccggcagggccaccgggttcatgatcgcagaggtcatgcccgcccccattgccatcggcaggaaagcgttgttgatgccatgacggttcggcagaccgaaggagacgttggaggcaccgcaagtggtgttcacgccaagctcttcacgcaggcggcgcaccagagcaaagacctgctgacctgcggtggccatcgcaccgatgggcatcaccagagggtccaccacgatgtcatgcgccgggatgccaaaatcggccgcgcgttccacgatcttcttggccactgcaaagcgcacatcggggtcttcggagatcccggtgtcgtcgttggagatcgccacaaccggaacattgtacttcttgaccagcggcagaaccagctccaggcggtcttcttcaccggtgacggagttcagcagcgggcgaccttcggctgcggcaagacctgcttccagcgcgccgggcacagaagagtcgatgcaaagcggaatatcgacaaggccctgcaccagctcgacgatcttggtcatcaagggcggctcggtctcattcgggttcgggttggaattgtagacaacacctgcattgatatcgaggatgttggccccggccatcacctgcgccaatgcgtccttttccacggtcgagaaatcgcccgcttccagctccgccgccagtttcttgcggccggtggggttgatgcgctcgccgatcacgcagaagggttcatcaaagcccagaacagcagtttttgtttttgattctacgacagtacgggtcatggtttatccttgctgtttggcggggcgagtggactcgccgccattgttgatggcccaggtggcgttggttttgatgccgccgagcgggaagaagtgaacattggtgatgttgaaatcggggtttgccgccttgtaggccgcaagctcagccacaacctcgttgggctcatagggcagcatcagcttggtgacatccatggcgcgtttctgaagcaccttgagcgacggtcccacaccgcaggcaatggcgaatttaatgagcgtctgcagcttggcaggccccgcgatcccgatatggatcggcaggtcaacggccgcgtctttcaggccgttcgcccaggcgatgatcggctttgcctcaaatgcaaactgggttgccagcgccattttcgcgtcggtccgctcggaaaatttctgtttccactgaagcgcttcggagacgtttttcatggagccgtcgggatcaatatccttgttgccctcggggtggcccgccacatgcaggttggtgaaccctgccttgtcgaagaggccggtctccaaaagctgcatggagctgtcaaaggcaccatgaggctgcgccacgccaccggccagcagcagggcctgtttgacatccgcctcaccctgatagcgcgcaatccaatcggcaagcgttgcctcatccttgatgatgcgggccgggaaatgcggcatcaccgggtagccttcgtcattcaggcgtttggctgtggcgatcatatcctcgatcggggtgccctcaatgtgggcaatatagactcgggtgccggcgggcagaagctcgcggaagtcctcgaccttttgcgcggtgcgcggcatcacctcgatggaatagccctgcagaaaggcctccacgtccgggttcacggtgatctctgtgtcagccgcacgttttttgaagttcagcaaagccatggcggcctcccataatgcgttgagggctgtcatgcccagccatcgtttgcgatcaaggccttgaggcggtcctgatcgtattcctgctccagacgcgtggcctctgcttcggcaatatcaccaggctcaccctccacgctgaaaggtgcggctttgcgccattccgcgagataggcgtcgctatccttggcgttcaccttcattgcggcgcgatcaatcgcctgctcaaagcgctcttcaagctggcgtttcgcaccccgtcgccccttgcccacaatgacctgggccgggatgtcgcgccaataaacgatggtgacgtctggcattgccgttcctttcagatccgtctgtcgtactgcgtttctagtccgccgccaaaggtcgggtgcgtcggatttcgacaacaaagatgggaggagcgacgtttgcgacctttgcacgcatttgtgtccgctgctggcaacaccgctctgggcgagggtgagtctggtttttgaatcggctttcctggctgcgcgccgatacagtcccttgcggagagccccctgcggacgtactgtaaattcaacacgataatcggagggcgtgattcatggcgcccaggcgttccaaaggtacaggagcgtttcccagagcggttgagacccctgtaccggcccggccagatccggatgcgctctatgcagcgctggatcttggcaccaacagttgcaggatgctgattgcccaacccaagggcagcggcttccatgtggtggacagtttttcaaagtcggtgcagctcggctccggccttgaaaagactgggcgtttgtcgcgctcttccatggcgcgcaccattcaggcgctgcgcatctgtcagcagaaaatcaatcgcaatcgcgtaaaacgcatgcggcttgttgcgaccgaagcctgtcggcgcgcaaagaacgggcgcgacttcatgcgccagatcaagcgcgagaccggcctctccatggacatcatccagcccgaggaagaagcgcgtcttgccgtgatttcctgcgcgccgcttgtatcgacgaaaaccgaacagctcttggtggtcgacatcgggggcggctcgactgaactggtctggatcgatatttcctctgtaccgcgccgcgaccgcccgtcggcgatcatgcggctgcatgccggatttcacaccgtcgagagcccctttcccgccgccaaagtggtggattggatttcggtgccgctgggcgttgcaaccctgcgggaccagttcaacgacgtggaggacgatgccgcccgctttgccctgatgagctggttcttcgaggaacatctggccgattttgccccctacaaggacgaacaggcgcgcgaggggttccagatcgtcggcacctccggcaccgtgaccaccgtggcggcctcacacctggggcttaagcgctatgaccgcaccaaggtcgatgggctgcggatgacatccgatcagatcgacaaggtgatccgcggctacctcgaactcggcccgcaaggccgccgtcgcgatcctcgtatcggcgaagatcgacaagcgcttattatgtccggtgccgcgatcctgcaggcgctgttgcgctgctggcccaccgatcgcttgtcggtggcagaccggggcctgcgtgaggggcttttgtacgcgcagatgagcgccgatggcgtgttggaggacggccctttctgaggcccctttctgcgccggcaaaactcggttatagccccaaagccgcgcctttgaggtggcgcacgacgtgtaagaggaatgaccatggcgaagaaaccaacaggaaagaacacctctggccggggccagcgggatctgaccgtcaaggtcaagaccgcgcgtgggcgccgactgagctcgacccgctggctgcagcggcagctcaatgatccatatgtcaaacgggcgcaggccgagggctatcgcggacgcgcggcgttcaagatcatggaactcgacgacaaataccgctttcttgtgcccggggcccgggttgttgatctgggctgtgcgccgggcggttgggcacaggtggcggtgccgcgcatcaatgcgctgggcgagaaatccggcaaagccattggacgtttcatcggcattgacctgcaagaggtcgaaccacttgcaggcgccgagttccatcagctcgactttatggacgaaggcgcggacgatcaggtcaaggaatggttaggcggtcaggcggatgtggtgatgtcggacatggcggcctccagttcggggcacaagcagacggaccacctgcggattatgtctctctgcgagaccgctgcctatttcgcctttgatgtactcgaggaaggcggcacctttgtcgccaaggttctggccggtggtgccgaaggcgaactgcaaaagctgctgaagcagaaattcaaatccgtcgccaatgtaaagccgccctcctcacgggctgacagttcggagaaatttgttgtggcgacaggctttagaggctgatcttcacccgccgaacatcaaaagcggtgtctaacctctgtcgcgcatcgctttggggcgcagcgactttaccgcgagatctctgagcgacaggagcggatcactgttgcttgcgcccggcatgccgggcttttcagtcgcgcggcgcgccagtcccgcgcgcgcatgactctgcgttacgaccgagcgggtcagttccaggagcttagcacggcccgaaggcaaagcagtctgtgacataaaaaggttcccccgaaacgcgacccgtaaatccacctcctcctagctactgcgtaggcctggtcaagctctgggctgaaatacggcgaaaaacgtgcgcttcaggacaatttaagacgacagatcaggcatcgcgcgcctgtcggtcggtttgcaggaccccgttgatctcggcaccaaggatcaggatcgctgcattgaggtacagaaagatcagcgccgccatcgcccccgcaagccccgcataggtggcagaatagcttgcaaaactcgagacatagaacgcaaacccggcaccagacgcccaccacaacacgagcgtcacgagcgcccctggcagcacatggcgcagggtttcacgctttggcagaagaacaaggtgatagaggaacaccgccgccaccgggatcacggccacaacaagcccgttggcgccctgctcccagcctcgcagaaaatcgagatccggaaagaaacgccccacaaagcgcgcccccagcggcaagaacagttcaaacactgctgtcagcagcagccctgctccgcccaggatcaccagccccaaggagatcaggcggtgcttccagaagggacgtgtttcttcctgaccgtaggctctgagcatcgcgatacggatcgcatccacaccattggaggcaaaatagagcgccagcaccccgccaagggtcatgaggccagtgccagaggtctcgagcacggcatagacctcgcgggtgatcggctcagcaaccgactgcggccagctgccaaacaccagattgaccacgtcatccacaacgatgcgatgggaaaacaggctggcgatggcgccgctcagcgacaccgtgaagagaacaaaaggaaagagtgccatcatcatcgacatggcgatatggctgctcagcacccatgcattcttgcggctgaagcgcccgagcgcgcggcgcgcaatcacgagagcctgtatcacggcttggccaatcgccatcatcctctcctctgagaaggcaaatctgcgggcttactcatcgcgaaaaggcccatgtgccagcccggaccgcatcacggccaccagaaatgccgtgcttatcccaaacgcgagcatgcccgtcatggccgcaaaagacgcaaaaatcctgtgtccggcgtccaatacgatgtcgccatagcccagcgttgtgtaggtggcgaccgagaaatagaccgcctcgttccaggtttcaaaggtctgcgccttgagcaacagcgccgcggaccagatccagatctgtgccgtatgcgctccgaccacgaacccgatcgagatcagcaggaccccggtctgatgcgccatactcgagagacgttgaaagcggatgcgatggcgtcgcagcgcatccgcacaccacaaaagcatgatggtctcgaggatcaggcatacaaacagaaacagccccccccagaaaatttgctggatcaatgtcatctaagtagcgggtccttcgctcggtcaatagggcggcactctggcgcagcttagaaatcaggggttgatcgtgcaacgcctgcattacatccatgaggcaagatattggttcaaggggcattctgatgcttttgagtgtgaacggcctgacccatcgccaccccggcgggacccgcgatgtgctgcgggatgtctcgttcgaggtggcgcgcggcgaaagcgtggccctgaccggagagagcggctcgggcaaaagcacgctcttgcacatgctggcagcgctggaccgccccagccacggagagatccgctttctggaacacgagatcacccggctcaatgatcgcgcagcctcggagcttcggcgcagccgcattgcgttggtctttcaacagttcaacctcgtgcccgcgcttacggttgcggacaatatcgcgcttcacgccaagctcggcgggcgatttgatcccgcctggagtgcggaagtcacgtctcgactgggccttgcggatctcactgcgcgctaccccgagcaaatctctggcgggcagcagcaacgggtggcgattgcgcgcgccctgaccctgcgcccggatcttctgttggcggatgagcccaccggcaatctagatgaaaccgcaagcgcggaggtgctgcgcctgatgctggagctggtcgcggacaccggttgtgccttgttccttgtcacccattccgccgccatcgcggcgcgctgcagtcggcacctgcacctgagggccgggcaggtgcgggatcacgccccatgaggcagacgctctattgcttcctgagccattggcgccgggcgccgttgcagctctttttgctggttgccggtctggcacttgcaacggcgttgtggtccgcagttcaagcgatcaacgctgaggcccgcgcctcctatgcccgcgcggttgagcaacttggcaacactgagcttcaggccctcgcagcaccggacaatgacccgatcccgcttcagacctatgtctcgctgcggcgcgcggggtggcagctttcaccgatccttgagggcacttggcaggcagcgggcagcccgattacggttctgggcgtggatgcgctcagctacccgggcacggctgcgatgctggacgccgcctcagaggccgggttcgatcttcctgcgctcctgaccccgccgggcgtggtctatgcccatcccgacaccctgcccgcgctcgccgagtttgagaacagggttccgttgccacaactgccgccgcgcgtggtgctgatggatctttctcttgccggggaactgctgggccaggagaattcgctctcgcgcctgttgatcctgccggatcagccatccgggctcaccgcgcttgccgctcttgccccagagctggaggtctcgcaaaacgccgatggtgcgctggccgatcctgcgcgcctgacccgcagttttcacctcaacctgaccgcctttggatttctcgccttctgcgtcgggctctttatcgtacaggggagcgtgacactcgggatcgagcagcgccgcggtaccattaccactctgcgctgcctcggagtgtccacccgcgcgcttctgcgggcgctctgcctggaacttttgatccttgcagtcgtagccggaacattagggttggtcatcggctatctgctggcggcgatgctgctgccggacgtcagcgccacgctgcgcgggctttatggcgcgcctgttgatggcagtcttacgctgcgcccgctctgggtgctctcagggctgacgatgacggccgtaggcactgcggcggcagggctgcaggcttttttggcgctgcaccgtatggcgagcacgctctcacgcccggcggtttccgcctctcgcatcaccgcgcggggcattgcgctcttctgcggcgctgcaatcggtttgatcgcagccggcgcactcgcactctggggcctgccggggctctggggcggctttggctttctggggggcactctgctcgggagcgcgcttttggtgccgccgctcctctggggggcaaccggccttttcctcaaaccgctcaagagcccggtctggcgctggatggtggcagacagccgcttgcaactggtggggctttcgttgcccttgatggctctccttttggcgattgcgaccaacatcggtgtcggcaccatggtttcgagcttccggctcacctttctggactggatcgagcagcgcgtgcccgccgatgcctatctggaggtcacatcccccctcgcggctgaagaggtcgcgacatgggccgagagccttggcgcccgcaccctgccgcagtatcgcagcgacagccgcaccgcctcggcgccgctgcgcatctatggcatcgtcgatgatccgatctaccgcagcaagtggccgcttctgagcgcagacccagaggtctggacacagctctacagtgcgggcgcggtgctggtcagcgaacagcttgcgcatcgcgaaggtctggcgctgggcgatcggctgcgccttgccccggactggtcgccgacggtggccgggatctatccagattacggcaacccggacggtcaggcggtggtggcgctctccacgctgcgcgccaagcgcagtgacctcgccgtatcgcgggtcgggctgatcgcgccagaaggcctctcgaccgcagagctgatgcaacgcgcgcggggcgacctcaatcttggcaccgatgagattgtcgagggcgcggcgatccggcagctctcggttgggatctttgaccgtacctttgtggtgacgggcgcgctcaacatcctgacactgggggtggcggggtttgcgcttttgaccagctttctcagccagtggcacaaacgtcttccccatctggccccgatctgggcgatgggtgtgacgcggcccgcgcttgcagggcttgagctatgccgcagcctcgcctttgcgcttgccacattcatgctgtcgctgccgctgggattgtttctggcctgggccttgctgaaggtcatcaacctcgaagcctttggctggcgcctgccaatgtatctttttcctgccgattgggggcgattgctggtgctgacgcttgcggttgcagcgcttgcgagcctcttgccagccttgcgtctcgcgcggctcgcccctgccaccctgcttggagtatttgcaagtgatcgctagcctttctcgcgtttcctctttgctaacagacgcaggcataggcctttgtctgtgtctatgtctctgggccgggctcatgccgcttggcgctctcgcgcagggctttgccaatctcggcaccgaggccaccggctttgcggtgccagagcgcggtgtcgccttgaggtttcccgaagatcacgccgcccaccccgaatatcgcatcgaatggtggtatctcaccgcaaacctgcgcaccgccgagggcgcggatctcggtatccaatggaccctgtttcgctcggcgcttgccccggaagagcgcgcaggctggcaaagcccacaaatctggatgggacatgccgccctcaccacagcgaccactcaccgctttgcagaacgtatcgggcgcggtggcacgggtcaggcgggtgtctcggcagcaccgttttccgcctggatcgacgattgggagatgacctcaccggacgcaagcttggagaaactcacgctcacggcccgggggcaggatttttcctatgatctggatcttgccgcagatgcgccgctgatcttgcatggggatgcgggctactcggtgaaatcagccgacggacaggccagctattattacgcccagcctgcctatgaggtccaaggcaccgtgaccctgcccgaaggcccggtcaacgtcaccggttcagcctggctcgaccgggaatggtcgagccagccgcttgcagaggaccagaccggttgggactggttctccttgcgtcttgacgatggcgccaagctgatgggctttgtcctgcgtggagaccggggagatttcacctccgggacatggatctcaccggacgggacagctcacccgctctcgcccggcgcttttcaggccacgccccaagactggtcagaggtggccgggcgtagccttccaaccacatggcaggtttccctgcccgagcgcgacatcgacatccgcgtgcgcgcgctcaacccaaaggcctggatgggaacgcgtttttcctattgggaaggccccattctgatctccgggagccacggcggcagcgggtatctggagatgacgggctactgaccgtcgcgctccagcagatccgacgcacgataataggcacgcgccgcgcgatggatcggggccgtctgcccgttttgaaccataggtccggcctccagacgcgaaaaagccgggtgcgcgccgcgcaaaacgtcgagatcagagaacaccgcgcgcaccagttcatgcaccaccttgagccgctggtgccgtgttgtcaccaaagtcgccgtaaagccaaaggattgcaccggatgcgggttgccgcgatagaggttggccggaatctcggtgaactcgaaatacccggtatccgcgatcacggcgcggattgaaggttcatcaagcgacaccagaaccgagtcgcacgcagtcgtcgcctcttcgacggtggcagcggggtggccaacagcaaagaccatcgcatcaaatgtccccgcacaaagcgctgcggattgctcggaggcagacagatgatgcacctcggagaaactctccatgctccagcccagagcccccatcaacgcgagcatcgtggcgcgctgccccgagccctcattgccgatgttcacccgcatgccgcgcagatcggaaaaggtcgcaatctcggaatccgcacgggcaacaacggtaaagatctcttcgtgcagggacagcaccgcgcgcatgtccgaaaacggctccccctgtgacagtgccgccgtgccttcaaaggccttggcctgccagtcggactgaaccagcgcaaagtcgatccgcccttcgcgcaaatcgcgcagattgcccagtgacccctcgctggtctcggcggtgcagcggatcccgtgccggtgacggtccttgttcagaaggcggcagatcgcattgcccaccgggtaatagagacccgacaccgaccccgtgcctattgtgatgaaatcttcggcctgcgcctgagggctgctcaaggtggcgcacatcaatatggtcgccgcgagccccgttatggccctgttgatgatcgccatcttgccccccgaccagatatttgcgcgcaaagttccaaatggcctcaaatctgtcaagttcggtaggtctgcttacagtaagggccacaacgcgcgcttcggtgtttttttagcgtcaatgacctacctaaacacttgttgtaaatctcaatttaacgcagcgcccccaaattcagccgcctccaggcccgttcgggccccaaaacatgcacccgccgcggcaaaggccctgcttgcccgaggtgacacagggccaaaccctaatgacgcgcaatccaacgcggctggctcccacccgtctctccgggaaaatgaaaaattgacgtggccatatgaggaacggtcggaaaccccgctcaggacagcggaaatttcattcatgatcgagccagtagcccctgtggatgattcttcagggcgttcgactggatggatgtgtcacacaaatgaagaagcaaggtctcgacgcgacagaaattcggatcctgagcgccgtgcagcaacacggccaactgagcaagacccggcttgcggagcttgtgaacctctcgcccactccctgttgggcgcgcctggtacggctcaaggccgctggctatattcgcggctatcatgccgaattggcactcgaccggatcattgattttacccaagtggtcgtcaccatctcgctcacccatcaccgcaagacggattttgacaggtttgaaacctacatccgcggacttgatgaagtgatcgactgtgtcgccaccggaggtggcatggattatgtcatgaaggtcgccacccccacgcttgccgcctttcagagcctcatggatgagatgctctcggccgagctctccatcgatcgctacatgacctacatcgcgactcgtcagatcaagacgagccgcccgaacctcgcgaaactggtcgccaaaagcgagaaatgacccgacaagtctgatctgtccaaaacgggcgtcaaaattggtctgaacggtctgagaatttgaaaactccggaccaaattgcgcgcgtttttcgatctaaatcgtcgtcgaacacaggcttgtctcggccgatctggccgaccgttgggaggacgacacatgacgcaagcagacgatttcggctttggcacccagatccgcaaatccccgtatttcgacgccaccgtgcgttggggagcaaagggtttttccgtttacaatcatatgtatatcccgcgcgactttggcgatccggagcagaacttctggaacctcgtcaacgatgcaatcctatgcgatgtcgcggtcgagcgccaggtggagatcaccggaccggatgcggcaaaattcgttcagatgctcactccgcgcgacctgtcgaccatggccgtgggtcagtgcaaatacatcctgatcaccaatgccgaaggcggcatcttgaacgacccgatcctgctgcggctggctgaaaaccacttctggatttcgcttgctgacagcgacatcctgctctgggcgcagggcgtggcggtgcactctggcctggatgtgcagatttgcgaaccggacgtctctccgctgcagctgcaggggccgaaatctgggctggtgatgcaggagctctttggcgagagcatcatggacctcaaatactactggctgcgcgaactcgacctcgatggtatcccgttgattgtctcgcgcaccggctggtcgagcgagcttggctatgagctctatctgcgcgacggaagccagggcgacgcactctgggaacggatcatggcggcggggatgcagcatggtttgaagccgggccacacctcctccattcgccggatcgaagggggcatgctctcttatcatgcggatgccgatattcacaccaaccccttcgagctgggctttgaccggcttgtaaacctcgacatggaagccgacttcatcggcaaggcggcgctcaagcgcatccaaaaggaaggtcccgcacgcctgcaggttggtctggtaatcgacgccgcaccgctgcgggggcccaacaccacgttctggccgatcaccaagaatggcgaaaccatcggcaaggtcacatccgccgtctattccccgcgccttgaaaagaacatcgccctggcgatggtggacgccgaacacgcggtgatcggcagcgacgttgaggtgacaatgacctcgggtgcaacctctgccagcgttgtggagcgtcccttctttgatccgcgcaagcagattgccgccgcctgagcgttggagaggagaccaaaacatgtcccatctcgcgatcgaattgcactggcaacgtactgaaaacgaactgcaaaccggtaagttctcgaacgagcacacggtccagtacaatagcacctacgacgtccaggtggacgccgcccccgattggggcggcgacgctgcaaacacaaatcccgagcaagccctcgcctctgccctgtcgagctgccacatgatgacctttctggcgctctcggccaaggcggggtggccggttgcaagctatcatgactatgcagaggcgcaccttggcaagaacgccaaaggccagatgtccgtgacccggatcgatctcaatccggtggtgcgatttgatacgggctttagcgtcgatgcggaggagctcgcccagatgcaggaccgcgcgcaccgctactgctttatcgccaataccctggccgatagcgttgaaatcaacattcattgaaagaacacccatgcaaacggatgcaatcctcctcaagcaattgagcgagaccggcgtgctgcgcctcacgctgaatgatgtcgcgcgccgcaatgcactctccgaggcgatgctgggcacgctcggcgaggccttagccagcgcgggtcaggaccccgcggtacgtgtggtggtgcttgcggcaaatggccctgcgttcagcgcaggtcatgacctaaaggagctgacccgcggccgcgcggcgccggatggcggcaaggcctattttgcgcggatcatggcgctttgctcggccgtcatgcagagcattgtgacctgccccaaacccgtcatcgccgaagtcaccggcgtcgcgaccgctgcgggctgtcagcttgtggccagctgcgacctcgcgatcgccgccgagagcgcacgcttcagcacgccgggtgttcacatcgggctgttttgctccaccccgatggttgccttgtcccgcaatgtggctggcaaacacgccatggaaatgctgctgacgggcgacatgacctctgcggagcgcgccgccgagatcggtcttgtcaaccgcgtcacctccgaagacggcttgcaggacgcggtgctggaactggcgcataagatcgcgtccaaatcctccatgacgctcgccactggcaagcaggcgttttatgcgcagcgcgaaatgcccctgtcggacgcctatgactatgcagcggacgtgatggtcaaaaacatgttggcgcaggatgccgcagaaggcatcaatgcctttgtcgaaaaacgttccccgcaatggcaggatgcataagccgatgagcgccaacccctacaataccgatctggatcgcaccccggccaactatcagcccctgaccccgctcatgtttctggagcgggccgcaacggtatttccagagcacacggcaatcattcacggcccccttcgacgcagctacgccgctttttatgcacgcgcgcgccagcttggctcggcactgtcgcataggggcatcacgcggggcgatacggtctcggccctgctgccaaacacgtccgcgatgcttgagtgtcactatggcgtccccatgtgcggtgcggtgctgcattcgatcaacacccggcttgatgctgcgatcatcgcctttcagctggatcacgcgatgtccaaggtcgtcatcgtcgactctgaattcatgcccttgatgcaggaggcgctggcgctttgctcggtgcagcccctgctgatcgaggtcgacgatcccgtctacgagggcgcgcggatcaaaaccgaagccgtggactacgatagctttattgcggatggtgacgccgagtttgcctggctcatgcccgaagacgaatgggacgcgatctcgatcaactacacctcgggcaccaccggagaccccaagggggtcgtttcgcatcatcgcggggcctatcttttggcgcagggcaatgcgctcacgacaacgatgggcaaacatgcggtctatctctggaccctgccgatgtttcactgcaacggctggtgttttccctggacgctctcggcgatcattggcacccatgtctgcctgcgccaggtgcgggcggatcagatctggaacgcgctcgccgacgagggcgtcacgcatctctgtggcgcgcccatcgtgatgtcgctgatgatctcggcccccgccgacgtgcagcgccccctcgatcagaccgttcagttttttacagccgctgccccgccgccggaaaagctgctggcggacatgaaaaccgcaggctttgaagtcacgcatctttatggactcacagaaacctatggccctgccgtggtcaacgactggcatcaaagctggtccgagctgccgcacgacgaacagtcccgcctgaaatcccggcagggcgtgcgctatcttccgctcgagggactcaacgttctggaccccgaaaccctagagcccgtgccccatgatggcgaaaccatgggcgaggtcatgtttcgcggcaatgtcgtgatgaagggctattttcgcaatcctgacgccacccgaaaagcctttgaggggggctggtttcattccggcgatctgggtgttgttcatcctgacggctatatccagctcaaggaccgctcgaaggatgtcattatttccggcggagagaatatctcctccatcgaggtcgaagaggcgctgtatcgccatcccgcgattgccgtcaccgccgttgtcgccatgcccgacgagaaatggggcgaaacaccatgcgccttcatcgagctggccgaaggtgcagagatcgacaccgatgcgctcaggcaatggtgtcgtgaccaactcgccccctacaaggtgccgcgcaaatttgtcctgaccgaaatcccgcgcacctcaaccgggaaaatccagaaattcgccctgcgggaacaggcgaagtcgctctgctgatctgcgccgcgcaaggtgccgatacgcgatctgtgctgggggatcagaccctcggcgcagttccaccagggcgtgggcgcgttgtgacaaatttcgaccctctctgtaaaagggctgacctcacttcacggatggtgtaaacggcgtcgtcgcacccgcgcgcaggtgtggcctgcaggtttcaagaaaccaaagttcgaccgaaacccgcgcagcgccgggcgcgcagcaagggctaaaatcctctgcgaagcccaagggtcatacccgactctaacacgggcgatttggcaattcttgacaaaaatatcctgtgtcccaaggccctcagtttccaaaaccttgcgctctggcgaatttcctttcgcgggacttcttcaaaaactcttatatttaaattatccgtaaattcgattccctgccggggtcttgtcaattttggaactttcgaatgaaaatcaatacgatcacgaattgggcctacggattgactgttcttctgaccgcgttgtcgggcgccgcgttcatcgcgtcgatcaacagctcggccgaagaacgcatggcggttgaaacacatctaatcctgaacgagttgggcgaagagcttgcgatcggagcggagctgcgcaccgacgaggcacggctttatgtgatgcgcggcgacccggatcatcttgaggcttttgagcggaccgatcaggccgaaatggcgctggaagagtccgcccgcgacggcacgcgtcttggcaccaccccggaagagaccgcatttctgaatcggatcatcgcggatatagatgcgctgcaagagatggagcgtgcggcaatcaaagcttatcaagcgggcaacattgaccgcgcgcgggggctcttgttcgggggcgcgcattaccaggcccacctcaaactcattgacgatgtagtccagttccgccggatggtgcaaagccggacagaccgtgagctcgacaccgcacatcaacgcagcgactggttcgaattcgttgcgcagatctccctcgcgctcaccgccaccgttttcctcggcgtactctattttgtcctgcgtcgccgggtggcggtgcccctggcacgcatggccggcatcgtaaagcgcctcgccagccaggactacgaggtcgaggtgccattggatcgcagacgggacgagattggtgagctcaatcgcgccgtgcatgtgttccgcgaaaacgggctcgagcgggaacgtctcgacgccgagcgccgccgtgacatcaagatcaaggatctgatcctgaagctcatgcaccgggttcaggcctgccagtctctcgacgaactgggggatgtccttgcgcggtatgcgccgcagatctttcccgacctctccggcacgctctacctgcgcgctgacggtcacgagaccttgaactgtgtgtcccgatggcagacgtcattcgacgacccgctcgagatcatctgcgaggcctgctgggccctgcgccgcggacgcgctcattatagcgccttggaatcaaaagaagatgtgatttgcaaccatctcgctgacccgaacgtttcgaccctgtgcattccgctcgctgctcagggcgagaccatcggccttctgagtttctctggcgccgagacctcgacagaggttgcgcgcgaagatcgggtctatctggagcttattgctgaaaacgtcgcgcttgcggccgtgaacctcaatctgcgcacccggctctcgcagctggtcgaacatgatcctctgaccgggcttttgaaccggcgctcgctggatgtggcctttggcgattttgtgcaaaacccgccaacccttccgaccgcctgcctgatgatcgacattgatcacttcaagcggatcaatgatgagtttggccatgaggccggggatacggtgatgcaaagctttgccgggttactccgcgaggtcgtgggcgacagcggctcctgttaccgctttggcggcgaggaatttgtggtgatcctgccggatcacgacgtcgatgccgcgcatgagatcgccgaaggcattcgcacccgcaccgcaaagatggccattgcccatcgcgggcaatctcttgggaaggtcacgatttccatcggtcttgcggttgcagcatccgcaggcaccctcgacaccttgttgagccgcgcggattcagcgctgctgcaggccaaggtgacgggtcgcaacatcacgttgcacgagacacttgagctcgccccttcctgaggaacagcgacgacccgagacgccctcggatgtctctacagaccaggacaccccccaggaactgaaaaaccgccgatcttacgaccggcggttttctcatgcaaaagcaatgctttgcgatggtacccaaggccggactcgaaccggcacgctgtcaccagcgggggattttgaatcccctgcgtctaccattccgccacttgggcaacgcctgtttcctagcgctgctgcaggccgaggtccagaggcaaaatcgcggaaggatgcagaaaattcgcccatctccgggtgcatcggcagtgcagagttgacccgggcgggcgcacatgcgacctccgccccattgcttgtctctgaggtttccccccgaatgctgcgtcgcctatatgaccggaccatggcccttgccgaccatccccatgcgctgtggtggctggccggtgtggccttcatcgaaagctccgtttttccgatcccgcccgatgtgctgatgatcccgatgatccttgcgcggccctctcgcgcctggctgatcgccttggtggcgctgttttcctcggtggccggcgggctcatgggctacgcaatcggcgccttcttttacgaaggcatcggccaaccgatcctcgaggccatgggcaaggccgacaagatggtcgaattcaacgagcgttttaacgactttggcttctgggcggtgctgatcgctggggtgacacccttcccctacaaggtcatcaccatcatgtcgggctggacgggcatgccgatcatgacattcgtggtcacatcgttgctggcacgggcgttgcggttcttcctcgtggccgggctcttgtggcaatttggcgcgccagtgcgggagtttattgaaaaacgcctggggctggtgttcaccgtcttttgtgtgctgctgtttggtggctttcttgcactgaggtatctatgacattcagccgatttctcgtcctgctcgcggccggtggctctgccgccttgctgctgggcgcctttgcgtttcaatacattggcgagcttgcgccctgcaaactctgcatctggcagcgctaccctcacggcgcagcagttggcgtcggcgcgctggcgttgctcattcccggcgcggtgctgccctatctcggcgcggtggccgcactcgccacctcggcgattggggcctttcacgcgggtgtcgaacaaggttggtgggaaggcccctccacctgcacctctggcgcgatcgaaagcctcagcgcagatgagctgatgtcgcagatcatgtcggcaccgcttgtccgctgtgacgacatcccctgggagatgctcggcctctccatggcaggctggaacgcggtgatctcgctcggattggctgcgctttggtttgcagctgcgcgtcacgcgcgcaaaaacgcctgaccccaggcgcttagacgcgactatctttcttggtggccagaagaaggtttgtctcgctggtcaccaccccatcaaacatgcggatctttgccagcgcctcatccagcgtctccagcgtttctgtgccgagctccacaatcagatcccaacgcccattggtggtgtggatcgcgcgcacttcgggcaagccctgaagctgacgggtaatccgcgccgctccgcgcccctcgatgccgatcatcatcagacctcgcaccggatcgcgcagcacgtcctctttcagaaccacggtaaagcccagaatatccccgcgcgattgcagccgctcgatccgcgtgcggacggtggtgcgcgacagctccagctgcatggccagatcagagagcgaagcccgggcatcgtggcgcagggccgcgatcaggcgttcatccgttttgtccatgaatcggctccgttttgtggtatccgctccccttatgagcaatttgctctctgtattccacctcaaatcggagaaatatcagagacaccctcaatcaaggagatctcggatgtcgtctcgtcactgtattctcgttggcgcacccgttgacagcggcaagcgccgcacgggctgtctgatgggccctgatgcctaccgtactgccggtctcgcgcaggcgctcgagagcctcggccatacggttgaggacatcggcaacgtgacccctgccccgcatgcccccgacgatggcaccggcaaactccacgagccaaatttaacgcgagcctggaccgaaagcctgtctgaagcggccgaggcggccatggcgcggggcatgcccattttcttgggcggcgatcacgcccttgccctgggcaccgtgcacggggtcgcaaaccacgccgccaccgtgggacgaccgctgtttgtcctctggctcgacgcgcatagtgactttcactcgctcgaaagcacggaaacaggcaatcttcatggctgcccggtgcgctatttcaccaatcaggcccggttcgacaatttcccgcccgtgcccaacccggtgccgccggaaaacgtctgcatgatcggcctgcggtcggtggatactcccgaacgcgaagcgatggagcaggtcggcattcatcgccacgacatgcgcgacattgacgaaaatggcattgcccggccgctgtcggccttccttgaaaaggtcgccgcgcagaacggcatgctgcatgtgtctctggatgtggatttcctcgacccctccgttgcgcctgccgtgggcaccacggttcccggcggcgccaccgtgcgcgaaggccatctggtctgcgaaatcttgcacgatagcggcttgatgacctcgatggacttggtggaactcaaccccttcctcgacgagcgtggccgtacagcacatctgatggtggatctctgtgcctctgccatggggcggcgcgtctttgaccgaccgacccggagctacaacacatgagcacgcttcaagctccggcagctgtggttatggtgcgcccgcatcattttacctcaaacccggaaacgcgaggggacaacgcctttcaggcgcaggccgataccaatgccgacaccatcagcgcacgcgcgatcgcggaattcgacagcgcggtcgccgcgctgcgcgacgctggcgtaacggttcatgtgttcgaggacaccagccgcgacacccccgattccgtctttcccaacaactggttctccacccatgccggtggtcatgtggcggtctatccgatgtttgcacccaaccgtcgccgggagcgacgctgggacgtgatcgagatgctgaagcgggagtatcgcgttcaggacgtgatcgactattccggcctggaacaggactctctgtcgctcgaaggcaccggcgccatggtgctcgatcatatcgggcgcattgcctatacggtaaagtcaaaccgcgcggatccggtgctgctggagcggttctgcacccatttcaactatgaaccgatggtcttcgaggcctgcgacgatcaggggcgtgacgtgtatcacaccaatgtcctgatgggtatcggtaccgactatgcgctgatctgtctggatatgatccgcgataccacccgccgcgctgaagtcaggcagcggctcgaagaaagcgggcgcagcgtcatcgacctgtctgccgcgcagatccagaactttctcggcaacaccttcgaactcactgggcaccggcgcgtgctggcgctctctgcccgcgcggcacaggcgctgaccccggaccagcgggcggtgatcgaacgctcggcagaattgctgccgctctccattcccacacttgaaacggccggtgggtcggtgcgttgcatgctcgccggcattcacctcagcccccgtcaaaggaccatgcaatgacccaaccttccgataaggcccttgttccttttgtcagcgtagacaacatgatgcgcctcattcatcatgttggcatcgaggatatgatgcgtgatctggccgactatatcgaggccgatttcaagcgctgggaactctttgacaagaccccccgcgtcgccagccattccgatgtcggcgtgatcgaactgatgccgacctcagacggtgaggcttatgggttcaaatacgtcaacggccaccccaagaacacctctgaggggctgcagaccgtgaccgccttcggcctgctggcggatgtctataccggctatccggtgctgttgaccgagatgaccattctgaccgcgctgcgcaccgctgcgacctcggccatggtggccaagcacctcgctcccaaaggtgccgacacgatggcgatgatcggaaatggcgcacagtcggaattccagacgctggcgatgaaggccatcatcggcctcaaggccgtgcgcctttatgacaaagacccggcggcgaccgagaaatgtgcacagaacctcgcggggcttggggtggatgtcaccatctgcaaaacccccgaagaggcgatcgagggcgcccagatcctcaccacctgcaccgccgacaagcaatatgccacgatcctcaccgacaacatggtcggcagcggtgtgcatatcaacgcgattggcggcgactgccccggcaaaaccgagcttgcgcccgggatcctcaaccggtcggacgtgtttgtggaatacccgccgcaaacccgcgtcgagggtgagatccagcagatgcccgaggattttgccgtgaccgaactgtgggaagtgatctcaggccagaaaccggggcgcaccggtgatcgtcaaatcacgctctttgatagcgtcggctttgccatcgaggatttctccgccctgcgctacattcgcgaccggatcaaagggacggactacttcatcgatctcgatatgctggcggacccggatgatccgcgcgatctctttggcatggtgcagcgcgccaaggcctgacgacaaaagcgcgcccctcgatggcgcgcttttctttttaaatcaagggcttcaagcctcaagctcactatcccaatagaggtagtccatccagctttcatgcaggtatccgggtggaaacttccgccccatattgcgcagctcttccgcgcccggacggcgcggcggtttgcgcagggacatgcccgcacggtgcagcggtttggagcctttcttcaggttgcaacgcgagcaggccgcgaccacgttctcccagctggtgatccccccagaggcgcgcggcaccacatgatcaaaggtaaggtctccctttgcgccgcagtactgacagcgaaattcgtcgcgcaagaataaattaaagcgcgtgaaggccacgcgcttttggggtttgacaaaatctttcagtaccacaaccgaaggtattcggatttcggtgctgggactgcgcacaacctcgtcatactcggccacgatggcaacccggtcgagccatgcggctttgacggcgtcctgccatggccagagtgacaagggatagtatgacaaaggacgataatccgcattgagcaccaaagccgggtgctgcttcagagcccgcggctctcttacgaattctgtcctgaagtctccgtccataaacgtcttcctcgccctgcttgcctcgagatggcaccagagcggggaacccgccccagcttgagattaactatatatcgtggccggaacctgacaagcccctattcgccaccagatgtcgtgtgggataggatgattccgtgacaggggcgtgacagttatccacagcccaaaaaacaggcgttctgcgctgcggcaccgatgcccgggcttgcaccgcgccccgcctgcccgtagagcgatcctcatgagccgcttgatccgtttcaacaaaccctttgatgtgctgccgcagttcaccgatcgtggcagcgagggcagcccgcgcgcaacgcttagcgattatgttgactgtcccggcgtctatcccgcagggcgtctggaccgcgacagcgaagggctgatgctgctcacagacaatggccgcttgcaggcctggatcagcgacccaaagcataagctcgagaaaacctattgggttcaggtggaaggcatccccaccgaggacgctttgaaggccctgcgccaaggcgttgatttgaaagacggaatgacacgccccgcaaaggcggaactgatctcggaacccgcacagctctgggcgcgcacgccgccgatccgagagcgcaaatccgtgccgaccgcttggctcgaactgaagatatccgaaggcaaaaaccggcaggtgcggcggatgacggccgctatgggctatccgaccctgcgtctcatccgctatgccattggcgcctggacgctcgatggtctggcgcagggcaaatgggacgatcttgacccgccccgcgtgcccggcccgccaaagcccgcggccaaaccgcatcgcaagcatgccgcaaaacggcgcgccacggcgacacctgcccgcaagccccggcagcgccgcgacggctaatcagatcagatgctgccctcagcttcgatcacgaggacacgcgccgcaccccgcggatgcgccacatgctcgtccccggcctcggcgtgaaagatatccccctccgacagcgagaagacctcctcccgaccggtctggcgcacatgcatatcgaccgcacccttgagcacgacaaagacctcggccccgtcgttgacatgccagacataggcttgatccgtccaatgcaaccggaccgtggtggcaccggtaaatcgttcaatatcaagcgcatcccatgcacgcgtgccggtaaactcaagcggtgaaatcagtttcatctttctctccattctgatagcgcgcatgatcttttacgaatggacgcaacaacagcccgcagagcgacggaaaatgacggcgtttcgctgttttggaccggcacaggcgcgggcgctttgaaaaggacggcgacgtggatctcgatccaaccaatcggcgcattctggcggaacttgcgcgaaatgcccgccagagcaccgctgccatcgcgcgcgcggttcatctctcgcgccaggcggtgcaggaccggatccgcgcgatggaagatcagaacatcattaccggctaccacgcagcagtcaccgaggccgcagcgcccttgcgggcgatgatcctgctgcagtttgcgacacgcccctgtgcaccggcgctgacctggctttcagaagtctcgggcatcacctatgtggcctcgctggccggggaatgggacgcaatggccatgatcgcggttgcagatacagatgcgctcacgcagctcaatgaccaaatagcaaagagcccgctcatcgagcgggcccaatctcagattatccttaaagaacagcgctgaacgcttgctagttcgcccgtcagaggctcagcttgtcgcgcatgaaggcaagcgccacgctcagcccatcgggggcgatcccatggccggttcccttcatcacatgggcaaacacatcccgaaagcccgcctcctgcaaggcttcggccgcctgcggcagcgattgcggcggcacgacgtcgtcctggtcgccatgcaccagaagcacaggcatccggctcacgacctcgtcgctgaacgtctcgggcgagagcaagcgccccgagaatgcaacaatacccgccaccggatcttcgcggcgcggggcgacatgcagcgccatcatggtgccttgcgaaaagcccaagagcaccacctgctcgggcagcagatcctcgtcgaccataagcgcgtcgagaaacgcattgagatcctcaaccgccgccatcatgccgcgcatggattcttcctcggaagagccatcgatccacgggatcgggaaccactgatagcccatcggcgccccggcgcaggcctcgggcgcatccggcgccacaaacagggtgtcaggcagatgttcagccagcggatcggcaaggcccagaaggtcagccccattggcgccatagccgtgcagaaacaccacggcagaacgagtttccccggagagcggctctttgcggccggcagtcaaaacgcgagtcatcggatcccttccctgtcctttgccacatggtaataggcccacaaaagccgcgccgcaaccgagcgccacggtgaccaggcctctgccatctcgcgcagggcgcgctctttggggcgctcggacagatcaaaaagcatccgcgcgctctcttgcagggccagatcgccaggcgcaaagacatcagcgcgccccaaggaaaacatcgcgtaaatctctgccgtccagaccccgatccctgaaacctgtgtcagttcggcgatcacctccgctgtaggagcgtgccgtaacgccttgaaatcaatgcgtgcctccgacagggcacgggcatagcggatcttctggcgactgagtccggccgcgcgcagatcctcgtcgctggcccattggatcttgcgcggcccagtaagattggcggcccgcatccgcgcccagatcgcattggccgacgccaccgagacctgctggctgacaatggcgctgagaagctgtgcaaacccgtcaggcttgcgccgcagcggcaagtccccggtctgcgcgagcgcttcggcaaagcgtggctcttgcgccgccagccaggcagccccttcggccacgcaggccggggtctcgatcaggcggcccaccgtcatctggagccacgcgcgaaaattgtatcggtgcactgcacgccgcttgttccttcacctgttcagggctacgcaatggccatgactatgaccgctcctgcccccgacgaccatattgcaaagcgcaatgttctgattcttgtgcttgcgcaggcctttttgggtgcgcagatgccgatgatcttcatcgttggggggctggccggtcaatcgcttgccaccaacccctgtcttgcgacattgccgatctcgctcattgtcgcgggttcgatgatctcggccacgccgatctctgcgatcatgcagcgctttggccggcgcgctggttttgcgatcggggccacgggcggcgcacttggtggtctgattggcggctatgggctctataccgggtcgtttccggtgtttctcatcggcagcgccctcaccggcgtctacatgagcgcgcagggcttctaccgctttgccgccgccgacaccgcctctgacagtttccgccccaaggcgatttcctatgtcatggctggtgggctcttgtcggccatcatcggcccgcagctggtcaaagccacaagcgacgccttcgtcattcctttccttggcacctatatggcggtgattgcggtcaatgtgctgggggtcgggctctttgcgttcctgcgcatcccccgccccgaagccccgagcgaggacgccccgatgggccgcagccgctgggagctgatgaaaacaccaaccattgccgtcgcggtcatctgcgccatggtatcctatgcgctgatgaaccttgtgatgacctcgacaccgcttgcagttgtaggctgcggctttggtcaggacgcggcggcggatgtggtcacatggcacgttctggccatgtatgtgccgtccttctttaccgggcatctgatcgcgcgcttcggggtggagaaaatcgttggcgcggggcttgtgatcctcgccggcgccggtgcggtcgccttgcagggcgtagaactcagcaacttctttgtggcgcttgtccttctgggcgtcggctggaattttggctttattggcgcaaccacaatgctggccggcgcgcatgaggcgcatgagcgcggccgtatgcagggtctcaatgacctcttggtctttggcggtgtcaccgtggcatcactggcctcgggaggcctgatgaactgctcaggcggcaacccggtcgagggctgggccgctgtcaatatggcgatggcgcccttcctggttctcgcggggggcgcactgatctggctggtgctgaaacccaaatccgccgcggcctgatcgccagacgggacctgatcgccagccgcagtctcagtccccattgcgcgggcgcagctaccagcgcccgctgccagcctgccacatcaggctgatacgccggcggaactcactgacgccaagcgcccctgccccaacccgttcgggctctgcccgcacctgccgcaatagcgcctccgcctgccagccgggcaggagcgccgcgcgcgcagcgggtgagaccgcgccccggcgacggcgcgccgctgccagccgatccagcccacgctctgccaaggcgaccagccctgcagaggtcccatccaagagcggcacgcggtgttgcgcctcaagctccgggatcgcccgcatataggccgccagacccgccgcataggcatagtcacgcacaacggcttcgtctgccgcccccagagaggccgccgccatccacatcagccccccggcgtttgcgtcgatataggcatcaaacgccgcctcatcctcaaaagggtcgcggtagatgtcccagcgtcgcgcctccgccatcgcgtcaatcgctcgcgccgcgctgcgatcaacaagccgcgtgagaggtgtcgccacatagtgtctgcgcaccggcccgcctgcggcgatctctgcgcccacatcacgccaccattgcacccgcatctctgcaatcatgctttcctggctggcccagggcgcacgcgaaatctccaggttgaacgcatagagggcaaacagcacagcacgcgcctctaccggcgcggccattgcggccaggaaccggtctggatcgcccttctgaaccgcctcggcgcaggcaatcaggtcatcgtcaaactgcatccgctgcctcagatgcatcccgcagaagcttccagttcatcgcatcaagcagcgcgtcgaacgaggcatccaatatgttggcactgaccccaaccgtggaccagcgccgccccttgccgtcctcgctgtcgatgatcacgcgggtcacggcctcggtgcccccctgggtgatccgcaccttgaagtcgaccagacgcatatcatccaacaccttggaatagcgccccaaatccttgcgcaacgcctttgcgagcgcgttcaccggtccacggtcgctgcccgagggatccagcgattcactcaccgagagcagcttttcaccgtcgaccttgaccacgaccaccgcctcggagaggctcaccatcttgttgtacttgttcttgcgccgctccacggtgaccttgtagcgcttcacttcgaaaaactctggcatctggcccagttcttcgcgcgcgagcagctcgaacgaggcctgcgcggtgtcataggagtaaccctcggtctcgcgttccttcacccgctccagaatacggcccaacgcagggtcgcctttttcaaccgtgaggcccgcctcggccagacgacggcgcaggttcgactgcccggcctgattggacatcggaatgatgcggccgttgccgaccacagccgggtcgatatgctcataggttgacgggtccttgaggatcgcgctggcgtgcaggcccgccttatgggcaaaggccgaggcccccacataggcggcctgcttctgcggcacccggttgaggatctcatcaagcatccggctgaccttggtgagccgggccagcgcgccttttggcacgcctgtctcatagccgctcgcgtagggctccttcagcagcagcgtcgggatcagcgtggtgagattggcgttgccgcagcgctcccccagcccattcagcgtcccctggatctggcgcaccccggcgtccaccgctgccagcgaacaggccaccgcgttttcggtgtcattgtgggtgtgaatgccgagcttctcgcccggcagccccgcagcaatcacctcagtgacgatccgagacacctcatgcggcagcgtgccaccatttgtatcacacagaacaacccagcgcgcgcccgcatcgagcgcggcacggcaggccgccagcgcatactccgggttcgccttgtagccatcaaagaaatgctctgcatcaaacagcgcctcgcgcccctcggccacgatatgcgccaccgactgcgcgatgttgtcgaggttctcgtcaaggctgatcccaagcgcggtcgttacgtgataatcatgcgacttgcccacaagacagaccgaccgggtgcctgcgttcatcacagccgccagcacatcgtcatttgccgccgaacgtcctgcccgcttggtcatgccaaaggcggtgagcgtcgcgcgggtcttgggcgcctcatcgaaaaaggcgctgtcggtggggttggcccccggccagccgccttcgatatagtccacacctaggtcgtcaagggcctgggcgatctgctttttttcaagcgtggagaattgcaccccttgggtctgctgaccgtcgcgcagggtggtgtcataaagatagagccgttccgtcacgacagcgcctccagctttgcagcgtcaaagcctgcgcccgggaccaattccaccccggttttggacatgcgcacctcaagccctgcctcggtataggcggccttcaggcgatccacctcggagaaatccttggtctccatggccgcctggcgtgccttaaacaggcgcgcctcatgggccgagagatccaccgagggcgcagcagcccattcgcccatctcatcgcccaaaaggccaaccagttggccagccgccaaaagccctgcaccatcgccagccgccgccagcttgtgcatctcggcaatcgcccctgcggtattgagatcatccgacagcgcgtccacaaccgcggcagctgcggtggcggcgggctcgatgcccgctgtcagcgcccgccacttgcgcaacgtcgcctccgcctcggcggctttcttctcggtccagtccatcggctttcgatagtgggtctgcaggaacacaaatcgcaccacctcgcccgggattccctgatccaggagatcgcgcacggtaaagaaattgcccagcgatttagacattttcttgccctcaacctgcagcatctcattgtgcagccaatagcgcgcaaactcgccttcggggttggcacagcagctctgggcgatctcgttttcatggtgcgggaacatcaggtcattgccaccgcaatgaatatcaaaactctcgcccaagagatcatgactcatggcagagcattcgatgtgccagcccggccgtccccgcccccatgggctctcccagcccggctggtcggcatccgacggcttccagagcacaaaatccatcgggtttttcttgtagggtgccacctcaacccgcgcgccagcgatcatatcgtcaaccgaccgtcccgagagctgcccatacccttcgcgccaggagtccaccgcaaagagcacatgcccctcggcttcataggcgtgatcgcgcgcgatcaactcttcgatcatggcgatcatctgcgggatgtattccgtggcgcgtggcatatgcgtgggctgcagcgccccaagcgcgcccatatcctcaaggaaccactggatcgtctccgaggtgatctcgccaattgcgcgcccgctttcggcggcgcgagtgttgatcttgtcatcgacgtcggtgaaattgcgcgcgtaggtgactttcttgtcgccatagacgtggcgcagcaggcgaaacagaacgtcaaacaccaccaccgggcgggcattcccaagatgcgcgcgatcataaaccgttgggccacagacatacatttgcacattgtcgggatcaatcggcgtaaagacctctttcttgcgggtctttgagttgtgcaatttgatcgtcgtcatgtcagctccttcgacaacaagtcagcgcgggcaaatcccaagcaccacagcaagcgcactgcgcgtagcgcgggcttagcaacttgtcacaagaaagagaacgacagaaaccagcccgctgtggatcagcaggcaatacagatggtaataatggtttcggtatgcgccatgggttgggcctagcacaagttgtgacaacggccaagcccggagttcgcaggcgttcctccgcgcacttggttcaggtgttgcgtttacgccttgccacactgcggtgtcggcagagtgtccggctgggaccataaaacgatccgaagttaagtggccctttccgccacgctgtcggccattttgtcagcaagtctgttagcgagcgtgtccgtctcaatttgttgaacctttgggtgtctggtctcagacccaagccccagccgttggacctcaaattctttaggtgccgccgaaatcctacccccgcccatacacgcagcctgtccggagttcggcattctccgcagggatgcggttgcgccgatcagaaccgaaaggaggcggtaagcgccaattgccggtgctctggtgacagggaatagttgccatcctcgccataatctccgctgacgctgcctcgcaactgaaagcccggagaaatctcgacttcccacccaagactgagggcctcttgctccggaagttcctcgacaaagacagaaccgacggcgcgcgggaccaattcgaacgtcgccgtttcacccgacgcgattgcaacagggggaaattcgacccgatagccggcccctgagtccgcctgcggcacagatcgccctgcctgaggctctgcgcgcagcgttgggatggggtccggcgagagtgtcccgctcgccagtcgcgcgccaaggaaccgcccggaccagtcatcggccagccctgcggacccaaccagcaggccgagcgcggcgacagcccccaaaagaggtgtcagaccacacaggacgcccatgttatgccgagcagcaaagcgcatcggtcaaccccatcaaaacaagaagatacaagccccgaaaggccgccgggccgcgcgactccggccctgtgttcagggtcgttcattatgcttaacaattcgttcagtcggctgggaaaatcggcatcagatcgcaaaaatccggcctgctgccgcgccggagaccagcggcttcaccaaagcaaaggccccctccgattgggagagggccagtttcgccgatcaggctctttttgttgaccgcccgatgtttttcttgccttgtccttctcggcgtatggggtgagcgcacccaccccagacagatttcgaaactccaaatgtctgagctccgatcctggtgagagatcaaccgcagtgatccctcttgttcgtcggggatgcccgcagatccaaaagagccgcctcatcccctgcgcatcccccgaggtaagcctacggatgcggtcttggatcccggcgcacgccttggcgccgggagatctcttagctacagcccgaggtggagccgcaggtgttgcatttcatgcaggtgccgttgcgcaccagcgtgtagttgccgcattcgccgcaaggatccccctcatagccctgcatccgggccttggtgcgcgcatccattgcgctgctcacggccggggcctcagaggtctcaggtaccagtttttgcagggctgcaaccggatcagtgctaccatccagagcggtcaccgctacactggtctggccgccttgcagcaccaccagttcctgcggcagacgcttgcgcagatagccggtagaggagatctgctttagcacctcgagcgatttcgacgcagccccatcgctcagctcagagaggttcgacacgccctcttctgcttcgccacggcccagatcatcaaaggttgcgccttcgggcttcacatgcgccagatccgtccgatcaaggtagctgacggcgagttcgcggaacacatagtcgaggatcgaggtcgcgttcttgatcgagtcgttgccctgaaccatgcccgcaggttcgaatttcgtgaatgtgaaggcatccacaaattcctcgagcggcacgccgtattgcagaccaaccgagaccgcaatggcaaagttgttcatcatcgcccggaagcccgcgccttccttgtgcatgtcgatgaagatctcgccgaggttgccgtcctcatattcccccgtgcgcaagtagaccttgtggccgccgacaaccgccttttgcgtatagcccttgcggcgctgcggcatcttggtgcgatgagatttcatcacctccttgatgaccactttctcgacgatcttctcggccagaacagccgctttttccggcaccgagccgctctcgagcacctccgccgcctcgtcatcatcctcaacgagcgccgccgcgagcggctggctcagtttggagccgtcacgatagagcgcattggccttcacacccaaggaccagctcagctcgtaggccttctgacagtcctcgatggtggcgttgttgggcatgttgatggtcttggaaatcgcaccggagataaagctctgcgcggccgccatcatcttgatatggctctcaaccccaagataacgcttaccttttttgccgcaggggttggcacaatcgaagatcgaataatgctcttccttgagatgcggcgcaccttcaagcgtcatggtgccgcagacatggtcattggcagcctcaatgtcggccttggagaacccaaggtgacgcagcagatcaaaggccggatcattcagcttatcggcaggaatgcccaacacgccggtgcagaactcctcgcccaatgtccactggttgaacacaaaccggatgtcaaaggcactctcaagtgcagcgtccacctttgccagctcattggggccaaaaccatggccggtgagcgaggtgtggttgatccccggcgcgttcccgatggagccatgaccgaccgcataagagacgatctcttcgatctgcgcggaggaatagccgagcccttcgagcgccgagggcaccgagcgattgatgatcttgaaatacccgccacctgcgagttttttgaacttcacgagggcaaagtccggctcgatcccggtggtgtcgcagtccatcaccagaccaatggtaccggtgggcgcgatcacggtggattgggcgttgcgatagccgtgttcctcgccaaggcgaaccgcctcgtcccaggcgctcatcgcgagttccgtgagacgcgcatccgggcaattctgcaaatccaacggcaccggcttcacggtgagcttgtcatatccctcggtcgcaccataggccgcgttgcggtgattgcgcatcacccgcagcatgtggtcggcattgcgctcatagcccgcaaagggccccaactcggaggcgatctcggcagaggtcgcataggccacaccagtcatgatcgctgtcaaagatccgcaaagcgcgcggccttcgtcgctgtcatagccgtagcccatgttcatcagcaggccaccgatgttggcatagcccagacccagcgtgcggaagtcatacgacagctgcgcgatttccttcgatgggaactgcgccatcatcaccgagatttccagcgtcagcgtccacagacggctggcgtgcatgaaatcttcggcctggaacacgccgccctgatagaaggtcaggaggttcagcgacgccaggttacaggcggtgtcgtccaggaacatgtattcagaacaagggtttgagccccggatctcaccatcttcggggcaggtgtgccattcattgacagtgtcgtggaactggatgcccggatcggcgcaggcccaggctgcgtggccgaccttctcccagagatcacgcgccttcacggtcttggcgacctggccgtcggtgcggttgatcagctcccaatcggcgtctttttcgaccgcatgcaggaatgcattggtgacgcggatggagttgttggagttctggcccgagaccgacgaataggcctcagagtcccaatcggtgtcataggtcgggaactcgatgctgtcatagccctgacgagcataatccagcacgcgtttgatataagtctctgggatggcgaccttcttggcttcgcggatcgcttttttcagagccgggttttccgccggatcataggcatcctcagagagaccgtcccacgtccgcagcgcttcaaagataccgttgagcatcttctcgtgcatcttggagccggccacgatggaggcgactttctgttcttcgagcaccttccattcgatgaattgctcgatatccgggtgatcggcatccacgatcaccatcttcgctgctcgacgggttgtcccgcctgatttgatcgcgccagcagcacgatcgccgattttcaaaaagcccatgagaccagaggatttgcccccaccagagagcttctcgccctcggcccgcagatggctgaagttggtgccggtgccggagccgtatttgaacaagcgcgcctcacgcacccagagatccatgatgccaccgtcctgcaccagatcgtccgacacggactggataaagcaggcgtgcggttgcgggtgctcataggcgctgtcggatttggtcagctttccggtcttgtaatccacatagtgatgcccctgcgccgggccgtcgatgccataggcccagtgcaggccagtgttgaaccactgcgggctgttgggcgcggcgcgctgggttgccagcatatagcgcatctcgtcgaaataggcgcgcgcgtcctcctcggaggagaaatagccccccttccagccccagtaggtccaggccccggccagacggtcgaacacctgtttggaggaggtctcgccgccgagctccacattgtcatcagctggaaccgaacgccacaggaactccggcacgcctttctcgcggactttcttcaggcgcgacgggacaccggccttgcgaaagtacttctgcgcgatcacgtcgctggccacttggctccaggtcgatggaacctcgatgccttcgagccggaacacgatggtgccatcagggtttcggatctcggacgtcgccccgatgaaatccaaggatgcataggcatcctgccctgcttctgtgaaacgacgctcgattttcatggctacacctgtcccaattagtcccgcttgcgcaccggcacccagcgtaccggcctgtgttgccgccaggggctaagcacaaaatccatcatccggcgcaggttcgctcccacgctcgaaggccctacaccggcccaaaattaacggttttgcactaagcaccatgcaagggagcagcgattgaaatccaactagatcttgtggcgcccccaagcgacacccacaatctcgcgtaagagagcctaaagggtcaacgcaaattttcaaattttacggaccagaatccagttgaccgtttttacggtttcgagggtcgcgccgagcatatgattcatccacaggcgcagaggtggatcgccaaatttgaatgcttggttaaggaaagatgaaaactctcgtaatgagaggggcttgtccgcaggacgtcattcgtgcacgcgcagaatgcatcgatacagtggcatttttgaaacaactcacggatgatttaccggccgtattcagagccgcgaccgatctgcaacgccccgcacgcgacgcgctgcttccgcaaaaatttcgagcagattttgacccctcctgacgccagattgcgtcagtttctaaacaaagggtaaacaccatatgtgggtataccgacgaaccgacccgctattcgtagggagtgattctctctggaacgtgatctgagcgtcaactcacccaaaagagcgggttgagtttcctgcacccgacgccgctgctgaacccgaaggttcagcagatagcagggtcttcatcatgtgaggaagaaatggtcggggcggcgagattcgaactcacgaccccctgtacccaaaacaggtgcgctaccagactgcgccacgccccggaccgtgcgtcttcctaacggggctgttctgatttgaaaagccctaacagggccattttgcagcttcagatgaaaaaacttcgtgccgcatctcagtgccaactgaaatcccgtaggtctcgacgatgccagcgttgacctcgagcacgaccaacacctgatcgccccccggaatcggcgtaagatccccgggcagagcgtttttatggatgtgcgatacgacgccgtccgcctcgacaaagatcatgtcgagcgggatcaaagtgtttttcatccagaaagccacgcgctgcggctcttcgtatatgaagagcatgccagagcgcgcaggaaggctcttgcggtgcatcagaccctgagcgcgggtttcgggcgtgtcgaccacttcgaccgagaaccgcgcctgcccccacgggccgcgcagatctacatggtcccgcgaacaggccgcggtagccagaccagaggtcgtgacgacccagagggcgacggctgcgatatgcgaggccgcccgacgaatcatcagacgctgctggtgtctgaagaggctgcctcccaggcaagcacatccacagccatccggccacgtttgccgtcgatcacgcgcatcgccagtgcctcgccggactgcacgtcagagagccccgactggcgcagcacttcgacatgcaggaacacgtcttcgtcgcggccaaacacattggcaaagccaaaccctttggctttgtcgaaccatttcacgcgcgcaggctccagcggtgtgttgctgagctcctcgtcatccagctgtgccagatcactcaggacgggggtgtcctcgcgctccggtggggtaatggatacgatttcaaccgcctgcacaccgcgatccgtgcgatgggtcacaacctcgatcccggcgccatccgcgacagagctttgcccgaagttacgcaggacgttcacgtgcaagagaatatcgggaccatcgtcaggacagacaatgaatccataccccttagcggggtcaaaccacttcactagtccacggacatgctgcaaactgctcagatcatcggccactttagtattccaccggttcgttttttatttccgtgatgcccgcctacctgcgcgaaatccatatcggagttcaagagcaaaagagtcaggagccacagagtggcccatgggcgttttcacggtgatcttacgggctaagacgcgtgattgtccaattatcatgtgaagtattttttcgccacacaaaacggtcgtgcaatcgaaaggccccatccgcccaaaattcaatttcaatcggtgtgatccggtagccgccccagaattccgggcgcttcggatttggacctttctgggcagtgatcttggccacctctgccatcagggcgctgcgcgaggcgagcggctgcgactgcttggaggcccaggccccaagacggctcttgagcgagcgggacgcaaaatactcatccgcctgcggtccgttttccttggtgacatgtccgcgcacgcggatctggcgacgcagggatttccagtgcatcacaaaggacgcggtgccgctggcctcgatctcctgtgccttggcgctctcatagttggtatagaacacaaaggcagcgtcttcgatttccttcagcaacaccatgcggctgttgggcatgccggaggcatccacggtcgcaagcgcaatggcattggggtcgttgatttcggtctcggtggcctctgccagccacttgcgggcgatctcaaacggatcatcgccgccaaagagtccttcacgatcagacataatggtgtttccctactgcttgcgcatacatctagtggccttgcaggccgttggaaagggggacgttctgcccgattgaacgcccccacaagagcgagtaggcttgatgactttgccccagcgggctaaaggacattctattaaccgatcacaggcggagaacctgcatgtctagtcaactgatggccggtaagcgcggcctcatcatgggcctggccaacgacaaatccattgcgtggggcatcgccaaagcctgcgccgaggccggggcggaacttgcgttctcctatcaaggagacgcgctcaagaaacgcgttggaccactggccgaacagctgggcagcgacattgttctgccctgcgatgtttcagacgaagcatccatcgacacactctttgcgtccctcgaggaaaaatggggcaagcttgactttgttgtgcatgccatcggcttttccgacaagaacgagctgcgtggtcgctatgtcgacaccagccgcgcaaatttccagatgaccatggatatttccgtctattccttcacggccgtggcggcgcgtgcggaaaagatgatggaagccggcggctccatgctgacgctgacctattatggcgccgaacaagtgatgccgcattataatgtcatgggtgtcgccaaggccgcgctggaagcctctgtgaaatatctcgccgaggatctgggcaaggacggcatccgcgtcaacgcgatttctgccggcccgatcaagaccctggccgcctccggcattggcgatttccgctacatcatgaagtggaacgaatacaattcgcccctgcgccgcaatgtgaccaccgatgacgtgggcaaatccgcgctctacctgctgtcggatctcgcctccggtgtgaccggcgagaacctgcatgtggatgcgggttatcatgtggtcggcatgaaggccgtggacgcccccgatatcgagaaaggctaacccctgatgagcaccaaggatccgaaccgcctgccccacgagaaggggtttcacatctcctgggatcaaatccaccgagacagccgcgcgctggcgtggcgtctggacgggcttggccccgacgatggccattggcgcgccgtggtggcgatcacccgcgggggcatggcgcccgcaatgatcgtcgcgcgcgagctggatatccgcacggtggataccatcagcgtgaaatcctaccactccggcggcggcaaggctgatcagcgtcgcgaggccgaggtgctcaagagccccgacgcggacatcatgggcgatgggaccggcatcctgatcgtggatgatctggtcgactccggcaaaacgctggaactggtgcgcaccctctatcccaaggcgcattttgccaccgtctacgccaagccccagggtgagccgcaggtcgatacctttatcacgggcgtgagccaggacacctggatctttttcccgtgggatatggcgttgcagtatgtcgaaccttaccggggtacggattgacccagcgtcaatttagaaaatgacaaaacgcgcccctgttggcgcgttttcttttttggctttgttttccatctcttgtcttgagatttgaaaagcggccgaatagcaaaaatccgaaaaaaattacgtcacgtcaaaagaggaaattcaaatgcatctttcccgcaccaacgccacttttgtttcgccaatcgtgcaatcccggcgctggctggaagatgtgaccttttccgacgatctgccgctcctcaatctcagtcaggccgccccggccgatccaccaccagaagggctgcgtcaggcgatggccgacgccctgttgtcagagaccagcgcccatctctacggaccggtgcttggcaatgcggatctgcgcaaagctctcgccgcccaaatcacgcgccactacgaggcggacatcacaccgtccgaggtcgcgatcacctcgggctgcaatcaggcctttgccgccaccatccagagcctctgcgccgaaggtgacgaggtcatcctgccgacgccatggtactttaaccacaagatgtggctcgacatgcagggggtcaccaccctgcccttgcctgtgggcgacggaatgttgccagaagtcgccaaggccgaagcgctgatcacgccgcgcactcgcgcaatcgtcctggtcacacccaacaatccctgcggcgttgaatatcccgcggccttgatggacgcgttctttgagctggcacagcgtcatgggctcacgctgattgtggacgagacctatcgcgatttcgacagccgcgatggcgcgccccacgggctgttttcgcgcaaggactggcatgaaaccctgatacatctctattccttctccaaagcctatcggctgaccggccatcgcgtgggcgcgatcgtggctgcgcccgagcgcctgctcgagatggagaaattcctcgataccgtcaccatctgtcccgcgcagatcggccagatcggcgccaaatgggggatcgagaacctcgatgactggctcgctggcgagcgcggcgagatcctcgcgcggcgcgacgccattgccgccggatttgctccgctggcggcaaaaggctggcagcttttgggactgggggcctatttcgcctatgtggcgcatccgttcgcggcaagctccgacgagatagcacaacgcctgcttcactcggctggcatgctgcttttgccgggcacgatgttcacaccggctggcgcccccgagggccaccgccagttccgcattgcctttgccaatgtcgatcagaccggcattgcggagatgctcgcgcgactggcgcagtttgacggttgataaaacctctgggctccgccgcgcgtctatgcttgctcccgccggggcagacgcgtattcagggcgacgacaggagaccgccgagccattcggcagaatttcggccgcccggcatccccgccccggcgcgccagcaaaaaagacgacataaagggccgcaggcatgaaaaagctttcaaagaccttcgtttggatcctcatgggtctgttgttcgtggggcttgcgggctttggtgcgatcaacgtatccggcaccacccgcacgctggccaccgtgggtgatgccaccgtcagcgttgatgactacgcccgcgccctgcaacaggaacaacgtgccattcaggcccagtccggccagtccattcccctgtcgcagctgatcgccatgggcgtggatcgcggtgtgctctcggggcttgtggctacggccgcgctcgacaatgagctcacagagatcggcctgtctgtgggcgacgaagtgctgctcgaagagatcacccggatttcggccttccaggggtctgatggcagcttcagccgcgacaactaccgttttgcccttgataacgcaggtctgtccgaggctgagttcgaggccgacatgcggtctgaaaccgcgcgcacgctgctgcaaggggccatcaccggtggcacccgcatgcccgcggtgctgggcgagacactcaccaactatatcggtgcgcgtcgcagcttttcctatgttcggctcgccgaggccaacgtccccctgaccgcgatcgcgcccaccgaggatgcgctcaaggcttattacgagacccacatcgaggatttcaccctgcccgagaccaaggtgatcacctatgtcgccctgcgccccgacgcgctggtggatcaggtcgaggtggatgaaaccgctctgcgcggtctctacgaggagcgcgacgcagaattcaacgtccccgagcgccgccttgtcgaacagctggtgttccccgacgaggacgccgcccaaaccgccaaggccgagctcgatgtgggggggaccacctttgaaaccctggtggcagatcgcgaactctccctgtcggacatcgacatgggtgatgtggcgattggcgaccttggcgctgcgggcgaagccgtctttgccgccgacgtgggcgccgtggttggcccgcttccatcagattttggccccgcgctctaccgtgtgaacggcgtgctcgaagcgaatttcaccagctttgaagaggccctgccggtcttgcgcgaagagctggctctggatcgtgcccgccgcctgattgaatcccgcgccgaagggctggatgatgcgctcgccggtggcgcgacgctcgaagatctcgccgaggaagaaaacggcgtggtgctcggccagcttgactggaccgccaataccactgacgacattgcggcctatgacaccttccgcaacgcggcagaggccgtgacgaccgaagatttccccgaagtgggctatctcgaggatggcagcctctttgcgttgcgcctcgatgaggtcctgcccccgcgccccgagccctttgaggacgcgcgcacagccgtttccgaagcctacgagggcgaccggatcgccaaggcgcttgccgcgcaggccgaacagatcaaaaccgcgaccgagggcaacaacggccagttccccgaaggtcgcgaagtgatcgagcagaccggccttacccggaccgcctatctcgatcagaccccggttgatctcctcaatcaggtgttcgaaatggaagtgggcgaagtgcgtgttgtctccgacgcagaaggcactgttgtggtgcgtctcgacgagatcctgcccccggatgacggcaatgacatgcagttcctgtctcaggcgctcggcgatcagctgaaccagtcgctctccaacgagatcttccagatctatctgcaatcggttcagacccgcgcccgtccgcaggtcaaccaacaggccgtgaatgctgttcacgccaacttccagtaactcagtacgaggcgcatgcgcttatggccctgatccccgatttcgacagtttcgccaaagcctatgaggcgggcgaaaaccaggtggtctacacacggcttgccgccgatctggatacgcccgtctccttgatgctgaagctcaccggcgcgcagaaggatgccttcatgctggaatcggtgaccggcggcgaggtccgcgggcgctattccatcatcggcatgaagcctgacctgatctggcgtgcgcggggcgaacaggccgaaatcaaccgcgccgcgcggttcgatcccgagggctttgccccgctcgacggcaacccacttgatacactgcgcgcgctactggccgagagccgcatcgacctgccggatgatctgccacaggcggcggcggggctgtttggctatctgggctatgacatgatccgccatgtggagcatctgccggatgtgaaccccgacccgcttggcctgccggacgcggtgatgatccgcccctccgtggtggccgtgctggacggtgtcaaaggcgaggtcacagtggtctctcccgcctgggtcagcgaaggccagtcggcgcgcgcggcctatgctcaggctgccgaacgcgtgatggatgcggtgcgtgatcttgaacgtgccatgcccgccgagacccgcgatctgggcgaggcgcgcgaggtcgcgcccccggtctccaacttcaccaaggacggctacatggccgccgtggagaaggccaaggactacatccgtgccggcgacatctttcaggtagtgcccgcacagcgctggacgcaggagttcccgcagccgcccttcgcgctctatcgttcgctgcgacgcaccaacccctcgccgttcatgttctacttcaacttcggcggttttcaggtgatcggcgccagccccgagatcctcgttcgggtctttggcaacgaggtcaccattcgccccattgctggcacccgtccgcgcggcgcaacccccgaagaagacaaagcgctggaacaggatctgcttgccgacaagaaagagttggccgagcacctgatgctcttggatctgggccgtaacgacgtgggccgcgttgccaagatcggcaccgtgaaacccaccgaggaattcatcatcgagcgctacagccacgtgatgcatatcgtttcgaatgttgttggcgaactccacgaggacaaagacgcgctcgatgcattttttgcaggcatgcctgcgggtacggtttccggagcgcccaaggtgcgtgcgatggagatcatcgacgagctcgaacccgaaaagcgcggcatctatggcggtggcgtcggctatttcagcgctggcggcgacatggacatgtgtatcgcgctgcgcacagccatcgtgaaggatcagaacctctatattcaggccgggggcggcgtcgtctatgacagcgacccggaggccgaatatatggagaccgtgcataaatcgaacgcgatccgccgtgcggctgcagatgcggcgcgctttaccggcaacggcaaccgctgagctaaatgcccagcagggaaaagaaaaacgcgctcccgagatcctcgtggagcgcgttttttttgacattcggctgtcgcattggccgacggtattagtttgagaccggctccagcaggcgtttgagactggtcgagatcggcaccagcgccacgctgctggcgcggtcttgcagcccccagatcagcagcgcggaaatcgtgtccggcttcagacgtcccagcatgatgaccgcgccctcctgaccggagcggaacgcggcctggtccagaaaacggcgcatggcgcgcgggtcctgacccgcgccgtcaaagtcgcgaaacaccacgcccgaaggaataccatcgcgcagcgccattttgtggaccgtgttcaggccattgtcctgtagcaccagcccatagcccagatcaccggcgatgctggccacctgatccgcaagcgcccggttgccctgcacgccgctgtcgatgccctcaaggatgcccaccgcctctggaaggcggtcaaaccacaccggcatcgcggtttcggcgtcctgcggctggccttcgcggggcagatccgccaacaccatgacctcaaaccccgccgcgcgccgggctttcatgcgtgccaccgcatccgggtcgctcgggtcgatggtaaacgtcagcggataggggaaatcctcaagcgcctcggcgcccaccgcgccttcttcttcgacgaggacaatcgacatcaagggcaggcccggctccgggtttgccggctcgctgttgcgcacaaagggcgcagcactactgtctgctgcagaagacgcatccgcgcccgtggtgtcgcgttctgtcagtggcagcacgcgcgtgccgatactgggtcctgcatttgtctctgggtcctcggaggcctgcggcagatccgcgattctcacgcccccatttgcccccgcgttgtcctcgaccggatcagaaggggtgagcgaccgcacgggcggagtggtcaacacgggcgacgcggtcacatccggaggcgtgccgatatctggcgcctccacttgaagcgtctcctggcgcaggggcgccggatcggcctcggtcgacagatcgggggtggggatttccgcgtctggcgcctgcagtggcaggtctgaggccgccgaaacctcgggccgtgtggcggaatctgctcccagatccggtgtggtgtcttgcgagggcgcctcagggcggatgctgtcatcgccaccagacacgggcgcatccgcatcggaagtcaccgcaatccggggggtgtcgctctgaaccggggcgccatccaatgtgacctcgggatcggtcgaaacgctgggacgctctggcagcgaagtgtcgatctcatctggggcgctgtctcggccaagggcatttgcatcgggttccgctggggcggcctcaaccagatctgcgtcgcttccgggcacatcggacgggggcgctggaacctcacgcggctgcaatgttgtgacgggcagttcctgcgagacatcgaccgcctgcggcaatggcgtcgacagcgaccacaccgccgcccccgcaactgcgaccagcgcccctacgctcacgccacccagaaatcctcgcatgcctgtttcgccttctcgcctgtgctctttctcacgcgcgccgcccatccaaaggcctcagcgccggtcatctttaccgtctgacgcgcgccagaccggatgtgcccttgacgctgccgcgcatccctgaacatgtatggtcccacacactatactgcggcgcgcaccccgcccgccacccttaaaagagcgtcccaagatgttgctgcttatcgacaactacgactccttcacctacaacctcgtgcattatctgggcgaattgggcgccgagatcgaggtctggcgaaacgatgcgttggacgtgcagcaagccatggcgatgaagcctgcgggcatcctgttgagccctggcccctgtgacccggatcaggccgggatctgccttgcattgacagaggccgccgccgaaacccgcacgccgcttttgggagtctgccttggtcatcagaccatcggccagtcttttggcggcaaggtcgtgcgctgccatgagatcgtgcatggcaagatgggcaaaatgcaccacaccgacaaaggtctcttcaagggtctgccgtcgccctttgatgccacccgctatcactcactggtggtggagcgcgagagcctgcccgactgcctggagatcaccgcagagctggaggatggcaccatcatggggctgcagcacaaggagctgcccatccacggcgtgcagttccacccggaatccattgcctccgagcatgggcatgcgctgctgcaaaacttcctgaatgaaatgaaagtgccggcatgagtgatgcgttgaaacccctgatcggtctggccgcggatcgcgccctgacccgaaccgaagccgaaaccgcctttgccgcgctgttcaatggcgaagccacgccaagccagatgggcggtcttttgatggccctgcgcacccgcggcgagacggtggacgaatatgccgccgccgccgccgtgatgcgtgcaaaatgcaacaaggtctcggcccccgcagatgcgatggacatcgttggcaccggcggtgatggcaaaggcacgctcaatatctcgaccgcaaccgcctttgtggttgccggtgcaggcgtgcccgtcgccaaacacggcaaccgcaacctgtcgtccaaatccggcgccgcagatgcgctcaccgagatgggcattcaggtcatggttggcccgaaagtggtcgaaaagtccctcaaagaggcgggcatctgtttcatgatggcgcccatgcatcacccggcaatcgcccatgtgatgcccacccgtcaggagcttggcacgcggacgattttcaacatcctcggcccgctcaccaaccccgcagatgtcaaacgccaactcaccggtgccttcagccgtgacctgatccgaccgatggcggagacgctgaaacagctcggctccgaggtcgcatggctggtgcatggctctgacgggactgatgagctcacgatcacgggtgtcagctgggttgcgggtctctcggaggatggcaacatctccgaattcgaggtccaccccgaagaggcaggcctgccggagcatccttttgaggccatcgtcggtggcacgcccgccgagaacgccgccgccttccgcgccctcctcgaaggcacgccctcggcctaccgggatgcggtgcttttgaactctgccgcagcactcaaggtggccggcgtggtgtcgtcgctcaaggagggcgcggaacgcgctgccgaaagcatcgacagcggtgccgctctgggcaaggtgacggcggttgcacggatcacgtcggaggccagctgatggccccgcaagaccacgcctcagccctgcggcctgcggtcgggggctgggcggagctgcccttctttgaaacccactggccccggatcgaggcagcgcttgcacaggagacgcgccagatcctgccccctgcgcatcagcgctttgccgcgctggagcgtaccccgcccgagtccacccgcgtggtgatccttggtcaggacccctatccgacgccgggccatgcgcatgggctgtcgttttccgttgaaccggatgtgacgcccctgccccggtccttgcgcaacatctatcaggaaatgcgcgacgatctcggcacctgcccggaaaccggcgatctgcgcccctgggcggcgcagggtgtgctcctgctcaatacggtgctgtcggtccccgcaggcgaggccaacggccacaaatcgctgggctggcaagagctggcccatcaggtgctcgacctcagttcgcgccgccccacggcctatgtgctctggggcaatcaggcgcagaagctcgaaagccacattcgtcccggcgatcacctgatcgtcaagacggcccatccttcaccgctgtcggcacgccggggctttttcggctcgcgcgtgttctcggcgatcaacgactggctcaccgcgcgcggcgagccgccgatcacgtgggcagacccacgtccagcccaagggagcatcttcgatgtctgagaccatcctcgacaaaatcaaggcctacaagctcgaagaggtcgccaccgacaaagccgccaaacctcttgcggatgtcgaagccgaggcccgcgccgcagatcccgtacgcggctttgccgagcgtctacaaaaggccacgcatcagggctatggactgattgccgaaatcaaaaaagcgagcccttccaagggtttgatccgcgaagatttcgaccctgccacgctcgctacagcctatgccgaagggggcgcgagctgtctttcggtgctgacagatacgccgagttttcagggcgcaaaggactatctggtggcggcgcgcgcggcctgcgatctgccctgcctgcgcaaggatttcatgtacgacacctatcaggtggccgaagcccgcgcgcttggcgccgactgtatcctgatcatcctcgcctctgtcagcgatgcacaagcggccgagctcgaagcctgcgcctttgaatggggcatggacgtgctcttggaggtccacaacgaagaagaactggaccgcgcctgcctgttgaaatcgcccctcatgggcatcaacaaccgcaacctcaagacctttgagaccacgctcgacaccacccgcaccctgtcgcggatggtgccgccggatcgcacgatcgtctgtgaaagcggcctgttcacgcccgaggatctggccgacatggcccagtatggcgcgcgcagcttcctcatcggtgagagcctgatgcgtcaggaggatgtgaccgccgccacccgcgcgatccttgcaaacccgctgaccccctcgctctgatccaatcgaactgacccttttgatctgtccacaggagagaccgccgatgtcgctcacacattttgaccagaagggcgatgcccatatggtcgacgtctccgaaaaggccgtgaccgcgcgcattgccgtggccgagggccatatcaagatggcgcaagatacctttgacgtgatcagcgaaggtcgcgccaagaaaggcgatgttctctctgtggcgcgccttgccggaatcatgggcgccaagaaaaccgccgaactgatcccgctctgccacccgctgccgatcaccaaggtcgccgtggacctgacgctcgaccccgatctgcccggcgtgcgcgttgagggcaccgtcaagaccaccggccagaccggcgtcgaaatggaagcgctcacagcggtctccacggcctgcctcaccgtctatgacatggccaaagccgttgataaggcgatggaaatcggaggcgtccgggtcctgctcaaagacggcggcaaatccggtcggtatgaggcgtgatccatgatctccgtcgctgacgcccgcgccgcccttctggaccttgtcgcgccgctcacggttgaaaccgtcccactggcagaggccgcagggcgggtgctggccgaaccggtctcggcccgccgcgaccagccgccctttgcggcctctgcgatggatggctatgcggtcaatgcggacgaagtcgaacgccacgcgatgttcaaggtcatcggcgaggccgcagccggacatgggttccagggccgtgtcggcgcgggacaagccgtgcggatctttaccggcgccccggtgccggagggtgcaagtttcgttgtgattcaagaagatgtggaccgcaaaggcgatctgatcacaatcacggacgcgccgggcgacaatgccaatatccgcgaccgtggccgcgattttcgtgccggacaaacgattgacgcgccgcgccttttgcgcccggccgatatcgcgcttctggccgcgatgaacatcgccgaggtacccgtgcggcgccgtcccgtggtggccctgatgtcgaccggcgacgagcttgtgatgcccggcgagatccccggccccgatcagatcatcgtctccaacacctttggcctgaaggccatgttcgaagaacacggcgcccatgtgcgggtgctgccgattgcccgcgacacagaagcctccttgcagactgcctttggattggcgcgggaggccgatctgatcgtcaccatcggcggcgcctccgtgggagatcacgatctggttgcaggcgtggccgagagcctcgggtttgagcgtgccttctacaaagtcgcgatgcgccccggtaaacccttgatggcaggtcgttttggcgaagaatctttggtggggctccccggaaatccggtctctgccatggtctgcgggcgggtctttgtggtctccatgatcgaagccatgcttggccttcccaccaagacgacgccacttgcacaagcgccccttgccgcccgactgcccgccaatggaccacgccagcactacatgcgcgccatatggcggggcgcagacgttcaggccttcgacagtcaggacagctcgcttttgtcggtccttgctcaggccgaagcgctgatcgtgcgtccccccaatgaccccgcgcgcgaggcgggctctctggtggagtatctgccgctctagcctgaaatctctgatgtctctgcgccttagctgggctttttatgttccccttatgacccgacccgttgacacaaaacgggaacatgaatagaacataaacaacgatattgtgcagagggggcagccatgctgacgaaaaaacagcttcagctactggagtttattcacaagcgtctgcagaaggatggcgtccctcccagttttgatgagatgaaaaccgcgttggatctgcggtccaagtccggcattcaccgtctgattacggcgctggaagagcgcggctttatccgccgccttgcccatcgcgcgcgcgccatcgaggtgatccgcctgcccgacagtctgggcggtggcggcgcgcttggtgctgcgagcgatggtttccagcccaaagtgatcgccggcggccggggtgacagtgccgacggcggcgctgcggcagaattgaaacccgtggcagataccggggcgacggaactcacgatcatgggccggatcgcagccggtgtcccgatcgaggcgatcaaccaggccgccgcccatgtggcggtgcccaatgccatgctctccagctcgggtcagcattacgccctcgaggtgcgcggtgactcgatgatcgacgccgggataaacgacggcgatgtggtggtgatccgcgagaccgacgcggccgacaatggcgacattgtggtggccctcgtggaggggcatgaggccacgctcaaacggtttgaacgcaagggccgcatgatcgagcttcacgccgccaatccggcctaccccacccgcagctataccgaggatcaagtgaaggtgcaggggcgtctggtggggctgatccgcacctactgagcaaacacctgcgtgcaccatttctcgctcggccgcatattctgtggccgggcgtttttgtcagggcgtttattcagggcgccgaccacaagcggcgcgcctgcccattggcggtgatcatcgcgccatttccggcaaaggcgatgctgcccgtttcccgcagttgtctgggcgtcagccagaggcagtctccggctgcggggggctcgacctctatcgagaggatgatgacctctcctcgcgcgcagcttggttgccatgcgcgcaatcccgtcttgcccaacacatgcacaaaacgcctcccaatggattggaagatctgaacttttccatctcgcccctcgggaatacggcgataggcgcgggcctggtccatcccgtcgccgtcattctcgagccagatccctgcaacaaaactcttgccgcttgggcgcgacaacgcgcgccctgtctctgtcatcacgcccacaagcccgccatcggcagaaatcagaacctcgggccggggggagaatggccagaccacaagcgccagcgcaattgggatcaaccctgcccaacgaaatcgcccctgccacaaaagcagccacaaggcgcccgccaccagaaccggcaggatccacgcctcgggcgcaactacatgaccgcgcgcgcccggccatgtggccacggtctctgccaccttcaggatccatgcgatgccctgcgacatgatccagaatccaaccgcgctggccccgatgggcgcgaggcagatcgccagcactgcgcccggcaccaccaccgcgcccatgaccggcaccgccgccagattagccaagagcccatagtgcgagatcatgttgaaatgcgccgccccaaacggggctgtggcaaggcctgccaccagcgacgacaccaatagcgcaagcccccagcgtgccgccgcccccaatacgcctcctcgcccggggcggaaccagggttgcaacagctgaaaggccacaacaagcgcaagggttgccgaaaaactcatctgaaaccccgcactcagcaggctttcggggcgacgcagcagtacaagcatggccgccagggcgacggcccgtaccgagatcgcccgccgatccagcatcaccgcgaccagcatcaccgccaccatcaggaaggcacgttcggtggcgacattggcgcccgagaggagcaggtagccaaagctcgcgacaagggccacagccgccgagagtttcttgaccggccagcgcagggcaatcggcgggcagagcgcaaagcaacgcctcagactggcaaagaccacccctgcaaacagccccatatgcaagcccgaaatcgcaagaagatgcgccagattgctcgcgcgtaggttctcggtcacctgtcgcggcacatgcgcccggtccccggtcataagcgctgtggcgacgccgcctgtgtcagccggcatggccgcccgcacccgctcagaaagctgcgcccgcaaggtcgccaccggcaagacctcgggtggaccggtccgcaacaccggcacacggctgtagccgacagcccccagtccgaggaaccaggcatgacggcgaaaatcaaagccgcccggttcggcgggtccctgcgggggcgagagattggcggtggtcatcacccatgatccgggcattggggcggagccctcaaagagcgaaattcgcaccctgtccggcgtccgcgcgggcgacatatcccgaagccgcaccgacccgagcgtgatccgcatcgcatccgaagccgagcgatccaccgcaagcacctgcccttcgaccgggccataatagcgatagctcagaaccggcgcgccaacctgatgcgcgcgcagccccatgtagcaaaacccaagccccaccaagagcaacgcccccgcaaggagaccaaccccgtcgccacgacgcgcgcgcaccccgagccccaccgccgcaaacaggatgccaaggtaatgcaaccgctggggttccatgggagaggcaaaatacagtccgatcccaaggccaaagaagaccggcacccatggaaacagatgtccccgctgggcctgcagccttgcatcaagagcgccaaacacgcgcacgcttgctccctgccttctggctcggtacacaggcgacaaacgttgaccccacaaggtttccaaaaggtaaatgccccatatgtcccaaccggtcgtcacccgcttcgccccttcgcccacaggctttttgcacatcggcggcgcgcgcaccgcgctgtttaactggctttttgcgcgtggccgcggcggcaaattcctgcttcggatcgaagacaccgaccgcgcccgctccaccccggaagccaccgccgccatcctgcagggcatggcgtggcttgggctggatcacgacggcgaggtggtaagccagtttgaaggcgccgagcgccatgccgaagtggcgcaccagctgctcgccgagggcaaagcctacaagtgtttctccacccaggaagaaatcgccgcctttcgcgaggccgccaaggccgagggcaaatcgaccctgtttcactcgccctggcgcgacacgcccgagtctgagcaccccgatgcgccctttgcgatccgcatcaaggcgcccaaagacggcgaaaccgtcattcgcgatcaggttcagggcgatgtgaccatcaaaaatgcgcaattggacgatatgatcctgctgcgctcggatggcacgccggtctatatgctggccgtggtggtggacgatcacgatatgggtgtgacccatgtgatccggggcgacgatcacctgatgaatgcagcgcgccagatgatgatctacgaggcgatgggctgggacgtgccggtctatgctcatatcccgctcattcacggctcggacggcaagaagctctccaaacgccatggcgcgcttggggcgcaggaatatcaggcgatgggctatcccgcggcaggcatgcgcaactatcttgcgcgtctgggctggtcgcatggcgatgacgagttctttaccgatgagcaggccaaagactggttcgatctggacggaatcggcaaaagtccggcccgatttgacaccaaaaagctcgaaaatctctgtggccaacatatcgcaatcgcggatgatgctgcactgcggcaagaaatcgaggcctatctggacgcggccggtcagccggccctaaatgacgtacagtcacaagggcttgagcgggcaatgtactgcctcaaggatcgggcaaaaaccttccccgaactccttgaaaaagcgcattttgtgctgacctcacgccccctggaacgggatgcgaaggccgaaaaagcactcgacccagtatccattggtatactgaacgaattgacgccgcatctgcaaaatgctagctggtcgcgagacgagttagaggccgccctgaatgaatttgccgcggctaaggacacgaagtttggcaaattggctggccccctgcgggctgtgcttgcaggccgcgcggtaacgccttcggtctttgacatgatgatttgcttgggccgcgaggaaactctggcccggctcaaggacgtaactggctgagcacccgtcaggatctcttgttaaggtctgggtaagcccgttcgtataggactgcgtctgcgcctttgatggcgcgggcgccccgctgcgcgggacgggccacccgccctctctgcgcctgtaacaggaagggacatctatgaccgacacacagaaaacagcccagctcagcttgaatggtgagacctacgaactccccatcttctcgccgactgccgggcccgatgttctggatatccgcaagctctacgcgcagtccggagtgttcacctatgatccgggcttcacctccactgcgagctgtgacagcacgatcacctatatcgacggcaacgaaggtgtgctgctgcatcgtggctatccgatcgaccagctggccggtaaatcccactacctcgaagtctgctacctgctcctttatggtgagctgccgaccgcgacgcagcttgaggatttcgagacccgtgtgacccgccacaccatggtccacgagcagatgcacaacttcttccgtggtttccgccgggacgcgcacccgatggcaaccttggtgggcgttgtgggcgcaatgtcggccttctatcacgactccaccgacatctccgatccgtggcagcgtgaagtggctgcaatccgcctgattgcaaaactgccgacgattgctgcgatggcctacaagtattccatcggccagccgtttgtgtatccgcgcaacgatctggattacgccgcgaacttcctgcacatgtgtttctctgtcccggccgagaactacaccgtggacccgatcctgagccgcgcgatggaccggatcttcaccctgcatgcggaccacgagcagaacgcctcgacctcgaccgtgcgtctggcgtcctcctccggggccaacccctttgcctgtatcgcagctggcattgcctgcctctggggccctgcccacggtggcgccaaccaggcctgcctcgagatgctcaaggaaatcggctctgtcgatcgcattccggagttcatcgcacgcgccaaagacaagaacgatccgttccgtctgatgggctttggccaccgcgtctacaagaacacggacccgcgcgccaaggtgctgaagcagtctgcagacgaagtgctggagcttctgggcgtggaagacaacccgctcctgcaggtcgccaaggaactcgagcagaccgcgctcaacgatccgtatttcatcgagaaaaagctgttcccgaacgtggacttctactcgggcatcatcctcgaggcgatgggcttcccgacctccatgttcaccccgatctttgcgctgtcgcgcaccgtcggctggatctcccagtggaaagaaatgatcggtgatccgcagaacaaaatcggccgtccgcgccaattgtatctcggtgagacacagcgcgactatgtcgacatcgaaaaccgctaagagaaactctctctgaaatgcgtgcgccgccccaattcggggcggcgttttcatttaaagcactgataataagtacaatatttccggtcgaggtcaggtatccccgattgttcagagcctggaaacgctgcgttttcagaaatgaagattaaaattctccgcacgccggggatttgccgtaaaaaaatcatgaatttgtcaaacgtgccgcaattctcgcggcgtcttgctgacagcgattaacccgatcccggcccgattttcgtggtggccagaggagtatttttatgttgatgcttgcacttattggctcgattgcggtcatcggcgcgtttgttgcgctcgatgatgacgacgacaccgaagacacgatccccgacaacaccgaaaccggaaccccaggttcagatcagcttgatggcaccgatggccgtgatctgatcacgcttggcgacggggatgacagcagctttggcggcgatggggatgacaccattcacggggatgccggcgcagatgtgctcggcggccagattgggggcgatgatctctacggtggcgatggtaacgataatctctacggcggcgcgggcgatgatttcctctcgggcggcgcggatgcagacatcctcgagggagggggcagcgacgaccgcatgaccggcggcggtggccttgacgttctgctcggcgggaacggcgaggacaccctgaatggcagccttggtcaggacttgctctacggtggcaacgacgacgatgtcctgaatgggggctatggtgcagacgggctgcacggcggcaacggagaggacacggtctccggcggcgacggcgatgatgtgatcaacgggggcgaactgcttgttgatacctctctcacctcggcgtccgccctgcgcgaggccttccttgatggtgaaaacagcccagccaacctggacttcctctttgaggatgacaaagagagcgacgttttgaatggcgacgcgggcagtgatctcttggtggggggcgcgggtgacgtcctcaatggcggcaccggcgacgacacgttcctggtcggagactggctgcaagccggcgaacaggtgatcattcgcgatttcgacgtggaagacgaagtcgtgctctaccgctactccggcgctgcaccagatctcgactacaacacggtcgtcaattctgatggatcttccgatatcgaggtcaccgtgaacggcgaggtggtcgcctatctcgagaacgcgggcgatgggttcgaccttgcgtcaaacgtggccctggtctctgcgtgatcttcggtctttgagcaaacaaaagccgccctcaatcgggggcggctttttcgtgggatcataacaagtggggcctcagcgcccctcgaaatccggtttgcgcttttccacaaaggcggtgacgccctccatgaaatcgcggctgcggcccagttccccctgcagatgcgcctccagcgacagctgatctggcaggctgttggtggtggattggcgcagcgcctgcttgatggcgccaaaggccttggagggaccagaggccaggtgcgcggcacgggcgcgccaatgcgcctcaaacccgtcatccgcaaccgcttcccagatcatgccccaatcgctcgcctgacgggcggtgatcttgtcggcaaacagcgccgcgcccatggccttggccagccccatctggcgcggcatgaaccaagtaccgccggcgtccggcatcaacccgatcttggcaaaggcctgcaggaaataggcgctctcggttgcgatcaccacatccgccgccagtgccagattggcgcccgcccctgctgccggaccattcacagcagagatcgtcggcactggacaggtgtagatcgcttccagcatgggcgtgtattcgtcacgcagcgtacgctccagatcgatctggttgccgctcgaggaggcatccttcaggtcctgaccggtacaaaaggcattgccagcgccggtgatcaccaccgcacgcgcctcttcggcggcggttttcatcgcatgggtgatttccgcccgcatctggctggtgagcgcattcatgctctgcgggcggttcaaagtgacggtcgcaagcccgttctcaagcgaatactgaatgtcgcggtagtccatgcgtgaaatatccctgttcgagttatgcgcatgttgacctaagcatccgacctcgaaaagacaaacgccgcgtcaggctatttagggattttcttgcgctttttgccgctcggcgagcaaagacatcagcgcagccccatgcgggtccatcgccgtctcgacccgctgataatcagatccatcccggttgcgacgcaaaagccccatctcaatcaggctccggcggatctgtgcggcatcgcgaaacacgcagtgttcgtcaatgacggccgaaatctcccgctcgctgaagtaggtccgcgacggcagacgcgcccagatcacccaaagacacagctctcgcacaccgcgtttggtcggccagctctgccagcgcgcctgcgcatcgaaatagcgcgccgcgcgcgcgatacgcttatggtcgatctcgggtgatggcgggttctgttggcgcagatgctgaaaattgcgataccccgctgcgcgggccacatggttcagcatttccacatggccgggcgcctgcgcaaacgcgcggcgtaaatgtttggcaaaatccgacacatcaggaatggtcagacggatcacatccttggacatcatgtcctccgtaacttcaggatgccggatatggcgcaggccatatggatgtccgcccttatccagtggcaccccgatcaggagtccaatggaagcaatgtgatgcaggtttagcgcgtggcggagccttggtgaactgcagaccaaggcctctttagcagatcatgccaagggcggcaatccagcacgccctcggcgccctccttcccgcaggacgggaagagaactcagtctttcaaaatttcccgcaggcgttcttgttcttcggccgagagcccgtctgcctctggtccagccgtcgccgtggcgcggccgcgcagatacatgaacgaaatgagcagagcgagcgccagcatcatgggccccgccgcccagaggatccaattggccccctgcgttgtgggcttgagcagcacatattccccgtaccgatccacgataaagtcgatcgcttcttcgtcgctatccccggcgacgaggcgctcgcgcaccaagaggcgcagatcgcgggccagatcggcgttggactcgtcgatgctctcgttgcggcacacaagacagcgcagcccgtccgagagatcgcgcgcacgctcttccaggaccgggtcgtccagaacctcgtccggctgcaccgccagtgcaggtgaaaggctcaggaccaaggccgcaaggcaggccgcgagaatgcgcgccacagaaaacagaggtctcattccgcgggcaccccctcggtgggggccttgcgcaccccggccgcaacccggaaccgacggtccgagaggctcaggaagccgccaagggccatcagcaggctgccgccccagatccagttggcgaagggcttgatataggtgcgcagagtaaatccgccgccctcttgcgcatcgcccagcaccacatagagatcgcgggtgaaccgataatcaatcgccgcctccgtggtgggcatctgcgccaccggatagacgcgtttctccggccgcagcgttgcgacgtccttgccgttgcgggtcacatccaccacgcccatcgtggtgaagtaattcggcccgcgcccctcttcgaccgcagacagcaccagttcaaagggaccgacgcggaacggctcattgaggttggcaacacggatgtcttctttttgccaggccgtcagccctgccacggcaaagatcgtcacgccaagcccggcatgcgccaccgccttgccccaatcggcacgcggcaaccgcatcaggcgcgagagccggtccttgcgccctgcgcgttgcaacaaatcaagtgcagcgccgcttacgacccaagcgcccagcagaacgccaacggggccaagcaggctcttttcggtctggatcgcccaggcgagccccgcaagggccagcgccagtacgatgccatagcgcagcgtccagagcgtcttggcgcctttaccgcgcttccacggcagcattgagccgatcggcagcaagagccccagcgccaccatgaagggcgggaaggccgcatcaaagaacggtgccccgaccgagagcttgcgatcaaaggccatctccgccaccaccggccagagcgtgccaacaaaaaccacaaagcagctgaccgccagcaagaggttgttggccaccagcgcgctctcccggctgaccatggagaacacgcctttggcctccatagcctgcgcgcgcagggcaaagagcagcagcgcgccgccggtaaagaaggcgagaattccaaggatcaccacgccacgctctggatcattggcaaaggcatgcaccgaggtcaaaagcccagagcgcacgatgaaggtgccgatgagcgaaaagccaaaggcgaggatcgcgagaaggatggtccagctcttgagcgcctcgcgcttttccaccacgatcgcggaatgcagaagcgcagcggcgagaagccatggcatgaaggacgcattctccaccggatcccagaaccagaagccgccccagccaagctcgtaataggcccaccaggaccccagcgcgatgccgatggtcaggaacacccacgccgccaatgtccagggccggacccagcgcccccaggccgcatcaacccgcccttcgatcagggcagccacagcaaaggagaacgccatcgagagccccacatagcccaagtacagaaacggcgggtggaacgcgaggcccggatcttgcaggagcggattgagatcctgcccgtcaaagggagggttttccagccgcaagaaggggttggaggtaaagaggatgaacgcgaaaaaggccacgccaatggccgattgcacactgagcacccgcgccttgagtgtcggcggcagcccgcctccaaacaccgaggccaaggccccaaagagggtcacgatcagcacccagagcagcatggagccctcatggttcccccaagtgcccgagatcttgtagatcatcggtttggcggagtggctgttgagcgtcaccagccgcagcgagaaatccgaggtcacaaaggcccatgtgagcgccccaaaggaaaacgccgtaaacaggaactgggcctgcgctgcgggttccgccacggccatccagccgggccagcgtttatgcgcaccaatcaggggcacaaccgtctgcacgatggcgatcataaaggcgaggatgagggcgaagtgaccgagctctgtaatcatacctgtttctatatcccgctcctgcctgcgcgccaatcacatttgcccgcgtcgccgcgccgcaggcagctgcgctctcacccgcgccgatcacggtgccagtccgccagtgcgggattgtccgagttttcacttttctcatcgtgatcagtgccttgacgaagggcgttcaggctctgaaggttctcaacagcctgcggcacccgcgccagactgcgcgcgatcccttcctgaaacgcctgcgtcttggcctgcgctcgcgcgccgaaatagaacgacaccacaatccccaggagccaccacagcggctctggcaccagcgcgatgccttgcatgcgcgcggcaaaccacaccgggtccagcattgcggcccccatgagccccaaggtccccagtgccagcatcggtcgcggcaggcggttgagcccatccataaagcggtcaaagccgctcttctgaccaccaaattccgccgcaaattgcgccaaagcagcggcctgcagatcatgcgcgcgcaccgcggactgttcggaattttcacgaaacacttcgaccgtttcgcgcacaagattgcgacgccccccaaagaacgtctcccaaagcattgaaaacatgtgtttacctcaagcccaatgcgcggtgcgcgtatgaaattcagccactgtgagatgataacgcggcgctatgaactcttctgcgcgccggatccagccgccctttttgcctgcacgcgtgcgggcatatttccggctctgcggacgtcgctcggccagctgaaaatagtagttccggcgcgcgatcccataggcattgaccagcgcgtccatattgaccgctccggcggccgcagccgctttggccgtgtgtggcccgatcacgccgtcaacgctgagatcatagcccatctcacacagcaactcctgcaggatccgcaccgcgttgccgcctgcgttgacatgcatatcaaagacgctgggctgcagcggcgccggcagcagatgcaggcgcggacggcgatagtattcgcgcagaaagatctctacggcctccttccggctcagggcctgcacatcgcgcgcatccaccctctcatcgccggtgagatccagcccaagtcggcgcatggtgtgaatggtcacgccatgtttggttgccccaccaggatcatcgggatcattcacatagcccccctcacgggcgacgatctcttgggcaattttgacaacatccatgcaagatcctccaatcgggaactggcaggaagactatcgcatgcgactttcgatccggtggtcggaccgtgcgctgcaaacgcaacgcgcccgggcggtgatcgccgggcgcgttatcagatcagaccagaatgcaaaaagatcagctgtcgccttcgcggtagacaccttgttctttcaaggcatccacgacctctttgggcatgtaggtctcgtcatgttttgcaaggatttcagaggcttcaaagacaccgttgacatatcgcccggtccccaccatgccctgattttcctcaaagagatccggcagaacccccacataggtgaccggcacgctggcgccaccatcggtcaccgaaaagcgcaccgcctcgccctgaccgcgttgcagggtgccttcttcgacaaggccaccgatgcgaaaggtctctgtcggctcgggcggggtctccatcacctgactgggcgagcggaaatagttgatgccatcgcgcatggcatagccaatgagcgccgtggacccaacaagggccacggtggcaagcgctatgatctggatacgccgctgcttcttcagggacttcatctggacctcttgatgttcaggggaacagcggtgccatcatcagcccggctgtctcgtcctcacctaacatcaggtttgcattctgcaaggcctgaccgctgctaccttttgtcaggttatccaacgccacgataacaattgcgcgccctgcgatgcgatcggcagtgaccccgatatgtacaaagtttgacccgcgcacatgatgggtggaaggcgcctcgccaaaaggcagcagctcgacaaagggctcatcggcataggccttggcaaatgtctcatagatcgcctgagcatcgcctttgacgtaggtggtcgcaaggatcccccggttcaccggcagcagatgcggggtgaactggaccttcacgggccgcccagcgatagccgagaactcctgatcgaactcgccgatatgccggtgggtgccaccaatggcataggcgttatagccttcgctcagctccgcatgcagcaggttttccttgagcgcccgcccggcgccggagaccgcacatttcatatcgaggatgatctcatcaaggtcgatcacacccgccgcgatcagcggccgcagcgcaaactgcccggtggccgcattgcagcccgtgcccgccaccagccgcgcgcccttaatctcatcgcgataaaattcggtgagaccatagaccgcctcctgctgctgctcgagcgccgcatgcgggttgccgtaccatttttcataggcctccgggtcgcgcagccggaagtccgccgacagatccacgattttcagatcacccggcagtttcgcgatcacctcttggctggtcttatgcggcagagcacagaaacacagatcgatctgtgcgaagtcgatttcgtctattttgcaaagggttggcagcgaaagatgacgcagatgcgggaatacatctgccatctccatgcctgccttgcgctcggctgcgagggctttgatggtgatgctcgggtgctgagaaatcagccggatcagctctgcgccggtatagccggacgcaccaagaattgccacgttatgggtcatgtcgagacctcgaatgttcagatatgaagggggcctgcaaagagcgcaggcaggacatcaggttgggcgcgagggtataatccctcaggccgcttcaaaagtgatttctcgtcgcaagaattgcgtcgcgcggctgctgacgcggttggcattcccggtggtcacatagcccgcattgccgccaccaatcatctcgggacgacgctcgagatagtgcgcgaggctgtcggcaaccagacggccctggctgaagacctgcacatcgggccccagcgccttttgaaagacgtcttccatcaacggataatgggtgcagcccaggatcgccgcctcggggcggggcatcttgcgcagcagcgcatcgacatggcttttcacaagcgcctcggcgaggatcatgtcgccctcctcgatggcatcgaccacgccaccgcaggcctgcgcttcgacgtcgacgccgatggcgcgaaacgccagctcgcgctgaaatgcgcggcttgccacggtggcaggggtcgcaaacagcgccacatgtttcacggccacctcccgcggaggagagttgtccccccactggcgttcggtgagcgcctcgatcagcggcacaaagacgccaagcacccgcttgccctctggcacgccggcctcctgcatgcgccgcagcgcagcggccgaggcggtattacaggccaggatcaccagattgcagccgcgatcccacatgtcatgcacggccttatgcgtcagctcatagatgtcctcggcgtcgcgcacgccgtaaggcgcatggctgttgtcgccgtaatacaggaaatccacatccggcaggcgcttttgcgccgcatccaacacggtcagaccaccaagaccggaatcaaaaataccaactgccatgtcacactgcctttgggtgtgcgggcgcgcgtcacgcccggtgtttttcttcgaactcgaacccgtagtcataggatttgagcggtgttggtgacagctcatacgtggctttgcgcaggaaatccatcattgctttggagtcctttgccaaggggtcaagcacatcgcgcccgatgggctcaccgatcaccaccttgacgggggtgtcgacgcgctttttgaactccttaatcaagagccccatgcgcaacgtgtaatgcaggtgcgaagcgatctgaaacagacgcgaggtatggccgtcgaaatacaaaggcaccaccaccgcatccgatttggccaccatccgcgcggtgaagccgcgccagcccggatccatgggatgtgcaaagggtttggaggccgtggagaccgtgccgcccggaaagatcccgatagcgccgccctgccccaagtaatcgagcgcgtccttgcgggtctgcagattgaccttcattgcctctttggtttcggcaaaatcaatcggcaggatcaccttgttcagatcctcggccttgcgaaacacctgatgcgccagcatgcgaaaatcgcagcgcgtgcgcgacaggatatgccccatcatcagcccatcaaggatgccgtagggatggttggcgatcaggatcaccggcttgtcgcgcgggatcgcgtcgaggctgccgcccaccacatcgaggctgaggccatagcgttcgacgatgacatcccagaaactacgcccggaggcgacttccatgtcatagcccttggcccgtttgatcagccgcaaccgaccggtggtgttttccatcagacggatcatgatccgacccggccgcgtctcggcagagtgggagtaggatatatcgcgcgcgatatggcgacgctcaagcatgtctttgtgatctccgtaaagacaaggaaagggcaccgatcaaagcaccctcccccgaccaaggccgggcgtgtatctagcccggcctcggtaacatattcatgacatccggttaattccagatgtcagatctgttcctattctgcggccgttttgaccggcgttgccccctgtttcagcgccacgagcaattcctcgcgccgtttggcggctgcttgctcgtttttcattttcacagggccaaagccgcgaatctgcaagggcagttccgcaagcgcaaccaaggcgcccgggtcgacgctcccggcctttggcagccacgccttcatgtcggcctcgtattgtttgatgagcgcgcgctccatcttgcgttccgcagtatagccaaagatatccagaggcgtgccgcgcagggatttgagcttggccagaacgcggaacagacgttcagtgcgggggccgaacttgcgctttttcgggcggccattggcatccttgccccccagaagcggcggcgcgaggttgtagctgatcttgagatccccctcaaaggcctcttcggccttctcgcgactgctcagaagaagccgcgccacctcgtattcatccttgtagctcaacagcttatgatagccttttgccacggcttccttgaggcgggcgtcagaaattccgctcaggagtttgtcataccgcttggccagacgcttgccttggtaggcgatcagatgatcgcggcgataggcgatcttctcatcaagcgacttgggtagttccaccacattgggcgtcagcagctttgctgcctcgtcgggatagagcaccgcccaacggccaatatcaaaggcgcgcaggtttttttcgaccgctgcgccattcagctcgatcgcctgtttgatcgcctcaaaccgcaccgggatcagcccccgctgccaagcggcgccaaagaccatcatgttggagaaaatcgaatctcccatgctgacccgtgccagttccgacgcatcaaagagatcaagccgatcccgaatccgcgcctgaagcgcgacctgcaacctgtcgcttggcaaggaaaaatcggtgtttcgagtgaagtcacccgtgatgatttcatggctgttgaccaccgcaccggtgcggcccgtcgaggtcagccccagcgtctttgcgcccgcgctcaccaccagatcgccgccgatcagcgcatgcgcctcgccggtggcgacccggatggcgctgatgtcttcgggacggttggcgaggcggcaatggatatgtaccgcaccgcctttttgggcgagccccgccatctccatcatgcccgcgcccttgccgtcgatctgggcggcctgtgccagcaccgcgccgatggtcacaacgcctgtgccgcccacgccggtgatcaccacgttatgcgtgccgtcgatctccggcagctgcggttcgggcaggtccggcaaatcgaggctggccgttgcgctcttcttgatcttggcgccctcaatgctgaggaacgacgggcagaacccgttgacgcaagaaaaatccttgttgcagctcgactggtcaatggcccgtttgcgccccagttcggtctcctttggcacgatggagacgcagtttgattgcacgccgcaatctccacagccttcgcagacgtccgaattgataaagatccgctgatcgggatccgggaacaggcctttcttgcggcggcggcgtttttccgcagcgcaggtctgcacgtagataatggcagagacgccctcgatctgttcaaactcgcgctgcacctgcatgagctcggcgcgctcatgcatccgcatgccgctgggaaagagcttggcgtccacgtcttctttttcgtcatagaccacggcgatggttttgacccccatcgcgcgcaattcatgggcgatctgatgcgccgtgagaccgccttcggcctgctggccaccggtcatcgccaccgcgtcattatagaggatcttataggtgatattggtgccctcagcgagcgccgcacggatcgccatcaccccggagtgattgtaagttccgtccccgaggttttgaaaaacatgatttctattggaaaacggagcctcgccgatccagttggcgccctcgccgcccatatgggtaaagccgaccgtttcccggtccatccactgcaccatgaagtgacagccaatccccgcataggcgcgtgcgccatcgggcagcttggtcgaggaattatgcgggcagccggaacagaaatacggcaggcgcgaggcgatttcctcagcgttgtcggcgcggcgcgcctcgtcaagatcggcaagtccggcgcggatcgcttcggtgtcgcgcccttcctcgataaggatattgcccagtttctcggcaatcatgatcgggtcgagcgcatatttcgtggggaacagttcctcgcggtgcatggtgcccgcgccgcccttgtaccagccatagacgcggcgaccgcgccggttgtcaaacagcgcttccttgatctggatctcgatcagcttgcgcttttcctcgacgaccacaatcaggtcgagcccttcggcccaggcattaaagcccttcatatccatcggccaggtctggcccaccttataggtggtgatacccaggcgctcggccatgttttcgtcaatattcaaaaggcttagcgcgtgaaccagatccagccagttcttgccggcggccacaaaaccgatcttggccccgggcttgccccagacccgtttgtccatcttgttggcgtggctgaaggcttcggcggcaaaacgcttgtggtcgatgatgcggtcttcctggcggaagcggtcatcatcgaggcgaatgttcagcccatccgcgggcagatccatttcgggtgtgacaagctgaatgcgattgggatcaccgtcgacaacagaggtcacctcgatggtgtccttcatcgtcttgagaccaacccagagaccggaaaaccgtgacaaagcatagccatagatgccgtagtcgagaatttcctgaacccctgccggacttacgatcggcaggtaacaatccaagagcgaccactcggactggtgcagcacggtggagctttcgccggtgtggtcgtcacccatcgccaccaggacgccaccgtgctttgaggagcccgccatattggcgtgccgcagcgcgtcgccagagcggtccacccccggccccttgccataccagagcccaaagacaccgtcgtatttaccctcaccgcggatttccgcctgctgcgccccccaaagcgcggtgacggcgagatcctcgttgagcccatattggaacgtcacatcagattgcgtcagcagtttttcggcccgcttcatctgcatgtcgaccgcgccaagcggcgagccgcgatagccggtcaccagccccgccgtattgagacccgcagccacatcgcgcgccttctgcatcaacatcaaacgcaccagcgcctgagtcccattcaagagaatgggcgatttttccagatcgtaacggtcattgagcgaaatcttttgcgtgctcatcaggtcctcctcaaccacgacttgctggcattttgaccagataataggtcataaatgctgacctgtatatccgattgtttaaagtttcggtgtcagcctccggtaaggtttgaaacttaggttcatcatcatgtagtttggggcaaagaggcagaaagagtaaaaacaatggattgggacaagctcaggatctttcacgcggttgcggatgcaggcagcctgacccatgcgggcgaacacctcaacctgtcccaatcggctgtttcgcggcagattcggggtcttgaggagagcctgaacgccacgctttttcaccggcacgcgcgggggctgattctcaccgaacagggcgagctgctgtttgacgccaccaaaacgatgtcaaaacgtctggaaaccgcctcggcgcggattcgcgacagcgaagaaggcgtctttggcgagttgcgcgtcaccaccaccaccggatttggcacgctctggctcgcgccgcgtctcatcaagctctacgagcagtatcccaacctcaaagtggacctgatgctcgaagagcgggtgctggatctgcccatgcgcgaggccgatgtggcgatccgcatgaaagagccaagccaggccgatctcattcgcaaacgcctgatgaccgtgcagatgcgcctctatgcgtcccgcggctatatcgacaaatttggctggcccgaaaccatcgaggaaatccgcgatcaccgcctgatctgccagagcctgcgttcggcgcaagtcgggtccgctgcggtcatggtgcaaaagctgatgacccataaccccaaatccatgctcacggtgaacaactatttcggcgtgttacagggggttttgcaggatctcggcatcggggttctgccggattacgtgaccgaggatttcccggatctggtgcaggttttgcccaatgaggacaccaatggtgtgccggtttatctcgcctatccagaagaattgcgccactcgcagcgggtctccgccttccgagactttgtgcagaatgagatcatcgcacaccgtaagcacatgaaagagcttgggaaaatataactttcccatctaccttctgcgccacgcgcaggagctatgcacatagcgcatggcaggcttgatccaacaagggtttcaaaacacttgcggcagcgcagcgggcaccctaaatcacctgcatgaagacgcggcactggccgcacttcatacctccctgttggacttcggccgagcttagtgctcggccttttttttggcccaacgcccgcatctctgtgcgcggttttatccttctttgtcgtgtggcgcgcgcccctgccagcccaaaacgcgcccgaggggcagatttcccgacatcatcatgccgttgccggatgttcatgcattccatttcgagaatgcccaatcatgaggcaatctctgcacgcctctcatgccccctttccccgcagcggggcttgctctaaaaggccgacaacatgaagcgacccggggggccatctagcgccatgcaggaaccagccattacgcctgaagtgatcgaaaaccacggactgaagcccgatgaatacgatctgatcctcgagatcatcggccgcgagccgaccttcaccgagctcggcattttctccgccatgtggaacgagcactgttcctataaatcatcgaaaaaatggctgcgcaccctgccgacctccggcccgcaggtgatctgcggccccggcgagaacgccggcatcgtggacatcggcgatggcgatgcggtcgtcttcaagatggaaagccacaaccacccctcctacatcgagccctatcaaggtgccgccactggtgttggcggcattttgcgtgatgtcttcaccatgggcgcgcggcctatcgcgtcgatgaattcgctgtcctttggtgagcctgcgcatcacaagacccgccaattggtaaacggcgtggttgagggcgtcggcggctacggcaactgttttggtgtgccttgtgtcggcggcgaagtgcgctttcaccccgcctacaatggcaactgcctggtgaacgcctttgcggcaggcctcgtaaaaaccgacatgatcttctactccgccgcctccggtgtgggcatgcccgttgtgtacctcggcgccaagaccggccgcgacggggttggtggtgcaaccatggcgtcggcagaattcgacgacaccatcgaagaaaagcgccccaccgtgcaggttggtgacccgttcaccgaaaaacgcctgatggaagccacgctggagctgatgcagaccggtgccgtgatctccattcaggacatgggcgcggcaggcctcacctgctccgctgtggaaatgggtgacaagggcggccttggcgtgcgtctggatctggaaaaggttccgcagcgcgaagaaaacatgaccgcttacgagatgatgctctcggaatcgcaagagcgcatgctgatggtgctgaagcccgagctggaggccgaggccaaagccgtctttgagaaatgggacctcgattttgccatagtgggtgagaccattgccgaagatcgcttcctcatcatgcacaacggcgaggtcaaagcggatctgccgctgtcaaagctttcgtcctcggcgccggaatacgaccgcccgtggatcgaggtcgaggcccccgcggcgcttacggatgcggatgtgccgaccattgacccgatcgacggcctgaaggcgctgatctccagccccaactatgccggcaaacagtgggtctatgagcaatatgacaccaccgtgatgggcgacaccgcgcgtcgtccgggtctgggtggcggcatggtccgcgtgcatggcaccgacaagaaactggcctttacctctgacgtgaccccgcgttacgtcaaggcgaacccggttgagggcggcaaacaggccgtggccgaagcctatcgcaacctctgcgctgtcggggccaagccattggcgaccaccgacaacctcaatttcggcaaccccgaaaagcccgagatcatgggccaatttgtcggcgcactcaaaggcatcggcgaggcggtctcggcgcttgatatgccaatcgtctcgggcaacgtctcgctttacaacgaaacagacggccaggcgatcctgccgacaccgaccattggcgcggtaggtctggttgcggcgggcgaagagccgatcctgggcgaggcccgcgacggtcatgtgctgctgctggtgggcgaaaccattggtcatcttggccagtcggcgcttctgcacgaggtcttcaaccgcgaggacggcgacgcccccgcagtggatcttgagatcgaaaagcgcaacggcgagttcatccgcaacaaccgcgatttcatcaaggcctgcaccgacatcagcgacggtgggcttgcgctcgcggcgtttgagcttgcagaggccgcaggcgtaggggtgcagatcgacgccagcgacaccccgacgctctttggtgaggatcaggcacgctatctggtggcctgcaacttcgaccaggccgaggcgctgatgatcgctgccggtcaggccggggtgccgcttgagaccgttggcaagtttaccggcgacacggtgaagatgggcggatcggaggcaacgctcgaagagctgagccagatcttccgcacgagctttgccgaagcagtcgcctaatcacaaaaggcggggacactcccgcgcccggaggggccttagctgttgctaagcccccttggcggccttgggcccggcaccgcgcctgcacggtgccgggcccaactgtgttgggcgggcccctttggggccggtccataagcaggcgggagcgccccccgtcccgtttcacatcggtcgcgacaaaacagaccttacaatcacggtagacttgcttgcgtcccccgcattgcagccctacattttggccaaagaacaccacagcaaggatgcgccccatgccaatgcaggcccatgaaatcgaagccctcctgcgcgagaccttcccggatgcgcaaattcaggtgggcggcagcgatggcgttcacatgtccgccatggtcatcgacgagagctttcgcggcaaaaaccgcgtgcagcagcaacgcgccgtctatgccgcgctcaagggcaagatggatggccccagcggtgagctgcacgccctcgccctgaccaccaaagcgccggagtagcatccggtatggaggcaatctggatcataggcggcgcgattgcgatcattgtcgcgatcgccctcttctcggattttctccatattcgcgagaagctcagacagcgccggatgccgccgttgacgcccgaggaacaagagatactgcatgaaaaagaagagcgcatgcaggatatgctggagcgcgcgcagagacgtcataccggagatttctttacaaaaccatggcgttagatcagcaacagacattccaatacgctgatctagaaccgcaatgataccgagcgccgcagcctcgttgctcggacccaaaaccacagttttcagcggctctatgaaccaggggccagaccgaaaggaccaataccatgaccgacgcaaagacccgcatcgatgaaaccgtcaaagccaacgatgttgtgctttacatgaaaggcaccaaggacatgccgcagtgcgggttctcctcgcgcgtggccggtgtgctgaactacatcggtgtcgactacaccgacgtgaacgtgcttgcggatgaggacatccgccagggcatcaaggattattccgactggccgaccatcccgcagctctacatcaagggcgaattcgtgggcggttgcgacatcatcaccgagatgacgctttcgggcgaactcgacggaatgtttgaacaaaacggcatcagcttcgacaaggatgccgccgacaagatccgcgaagccaacgcctgatccgttcgcgaggcgcaaaacaaaagcccgcagacctctgggtctcgcgggcttttttgtggcgcggcctttatatccgggcgcctgcgacatcagcattcctgcgacatcagcactagtggacgcaactgctcagcgcgcctgccccggggcgatcagagttcagacctgttccttgacgtcgtcaggagtctcttcacgggcctcatccgcattgccttctgccgccattgcgtcggcgctcggatccaccgcgggagtggttgcagcctcatcgtcgtcttcgtcatcatctggcgcggctttttcttcgatctcgcccgccagcgcttcggcccgtgccgcaagctctgcgagggtctcggcgacctgcggcggcaccacgggcacctcaatttgttcagcaggcggtggtggcgcgttgcgcaactcctcgagctctgcatcccgctcttcgagcagcgcgtctttctcggccagtttggcctcgacttccttgatgcggtcctcgacggctgcggtcttatccgcaagcatcaaacccgccatcaagagcatccgcgcctcgggcatccgcccgatttgatccgacagcacctgcgcctcgtcgtcgagcatccccgccgccatatgcagaaagctctcttcgccttcctgacaggacacctcaaaatcgcggcccccgatatgaatggtcacttccggcatcaggcttcttctccttcaggcaggttgggggctgtggcaaggagcggctccaatcgggccagcaccgcgttgacctcggcctgatcggtggcgcgggcggccttcagcccctccagctcggcctcaaggccagagttgatgagcgcaggatccgcaaccccttcggcattggccgcacgcagggccgcattggactggcgcaactggtcgttgctggcccgcaggccctgcaattcgccatcaagggcgctcagacgcagatcaagctcggcgctgacgccctcgtcagcaggctccacatcctgcgagacagcggcgctttcggcggcttccgcacgcgcacgcaattcggcgacttctgcacgcagcgcttcgagctcggcgctgtcggcatgtgcatcgcccttcacgtcagacgtcatctcggtgtcggcagggctctccggcagagccgagagctgcgcttgcagctgttcattctgggctgtggcttcgctcaggtcatcttcgagcttttcacgctcgcttgcggcctgattgcgtgcggcctcaagatcctgcttcaagcgcgcgacctcggctttcagtgcctccgtttcgacggagtttccggcctcgttgcgcagcagctccagttccgcatgcagcgcaatcagatcttgtgcgccatccacggcagccactttcttttccatgtcctcgagccggccatgcagcaggcgcagccgttcgatcagctgcgcattggccatcttctcgtcttcgagatcggccagaagctccgcatgcttttgcatatccagctcttccagtgtcggcaccggacgattggcatgcttttgctccagcgcggcgacgccgccatagatacgatgcagcgcggtctggatgcggccctgtagttcttctaactgctccatgcgttcctcttcacctcgtcttcccggggccaagaccgtagcctgcggcctgcccgtcccgagccgatctgtcgccgtttcgcgatgcctgccacccgtctgttcgcccgccccgcctgagcgggtcccagttgaacagggttcgaatcaacccggcagcgcgccaccgcgatcagcttatctcatgaaggggtaaaacacccccccattgctttcaagcacttgcagagcacagttcatggccagaccggcgccgggagtggcgaaaccccgcaaaacagggcctcagcgcttgatctttgctttgagactgctatccagcggcaaacccctgcgaacccaaagaggaacagttcagtggatctgacagccctgcgctctgaaaaccccgatcattggaacaaagccgccgccatccgcgccctgacgctggatgcggttgcgggtgcaaactccggccactccggcatgccgattggcatggccgatgtcgcaaccgtgctgtttgaaaagcacatgaagttcgacgtctccgcccccaaatgggcggaccgcgatcgcttcatcctgtcggccggccacggctccatgctgatctattcgctgctctacctcatgggcgacgcacaggtcacgctcgagcagatcaagaacttccgtcagtccggcgcgctcacggcgggccacccggagaactttcttctggacgcggtcgaagtcaccaccggcccgcttggccaggggatctcgaacgctgtcggctttgccatggccgaggaaagcctgcgcgcccagtatggcaagaaggttgtcgatcactacacctatgtcatcgcgggcgacggctgcctcatggaaggcgtgagccaggaggcaatcggccttgccgggcgtcaccagctgggcaagctcgtggtgttctgggacaacaacaacatcaccatcgacggcaccgttgatctctctgatcgcaccaatcaggtgcagcgcttcaaagcgtccggttggcatgtgcaggaaatcgacggccataacccggccgagatcgacgccgccatcgaggccgcgaagaagaccaagaaaccgtcgatgatcgcctgcaaaacccatatcgctctgggtcacgctgcgcaggatacctccaaaggccacggcgctctgaccgacgccgatcagctcaaagccgccaaggaagcctatggctggaccggtggcgcctatgaggtgcccgccgagatcaaatcccagtgggaagcgatcggccagcgcggtgctacggcgcgcgctgaatgggaagcgcgttttgccgagatttccaagcagaaacaggaccggttcaaccgggcctttgcccttgaggcgccgaagaagctctccgcgaccgtgaaggcgctgaaaaagcagatctcggaaaccaaacccaaggtggcaacccgcaaggcgtcggaaatggcgcttgaggtcatcaacccgatcatgcccgaaaccattggcggctcggcggatctcaccggctccaacaacaccaagaccggcgatcttggggtgtttgacaccgacaaccgcaagggccgctatgtctattggggcatccgcgagcatggtatggcggcagcgatgaacggcatggcgctgcatggcggtattcgcccctatggcgggacgttcttctgctttaccgattatgcgcgtccggccatgcgtctggcggccctgtcgaagatcccgacggtctttgtgatgacccacgattccatcggtgtgggcgaagatggcccgacccaccagccggtcgagcatctcgcgatctgtcgcgcgaccccgaacacctataccttccgccctgccgacgcggtggaaaccgcagaagcctgggaaatcgcgctgacggccaaggaaaccccgtcggtgatcgcgctcacgcgtcagggcctgcccaccgtgcgcaccgagcacaagctggccaacctcaccgagaaaggcgcctatgtgctggccgaggccgagagcaagcgtcaggtgatcctgatggcttccggctccgaagtgtcggttgcgatggctgcaaaagacatcctcgagggtcaaggcatcggcacccgcgtggtctctgtgccctgcatggagctgttccacgcgcaggacgaagcctaccgccgcaaggttctgcccgcaggtcccgtgcgcgtggccatcgaggccgccgtgcgcgatggcggctgggatcgcctcttgctgggggaacgcggccaggagaagaaggcaggctttgtcggcatgcagggctttggtgcttctgccccggcgggtgagctctttgagaaattcggcattaccgccgaaggcaccgtcgccaaggtcaaagagctgttgggctaagccgggtgctgggggcgctgcccccgaccctttcgggtctcccccgggatattttgagttagaagatgaaagggcgccccgggtttggggcgccctttttggtcaggtctggcgtttggtcaggtccggatgtcgtcagtgcgcggctttggtgccaaacagcggcgcgatcactttggtggcgagggggatcaagaggaggcccaccacaaagccgaggagaccgtcgaccaccgccttcaccagccattccaccagcccgtcaccttgggcgatggatttggcaaagctgtagatcgtatcttcgggccagtgccagcccatctgatgcgcggaatgcacaatgatcgacccgccgacccagagcatggcggccgtcccgaccacagtcagcattttcaggaaccacggcataaacgcgacaatgccgcggccgagggcgcgggtaacgcccgtgcggcccaccttggtaagccagaggcccacgtcgtccatttttacaatcaccgcaaccacgccatagaccacgatggtaatcatgatgcccaccacggccagggtggccgcctgaatccacaagacatcgctctcgatcgtcgagagagatatcgtcatgatttcagccgagaggatgaaatcggtcttgatggcgcctttgaccttctgctcttcgagatgtgccggatctccaatgtcgtggctgccgtctggcccgccggaatgatcgtcatggggcagcaccacatgggcgatcttttcggccccttcaaaacacaggtagcagcccccgaggatcaggagcggcggaatgagccagggcgcaaactgcgacatcaacagggccacgggcaacaggaacaccagtttgttgatgaaagagccgcgcgcaatgcgccagatcatcggcaactcgcgcgccgggtggaagccggtgacatatttcggcgtgaccgcggcatcgtcaatcacgatgccggccgccttcgagcccgctttcatcgattgggtcgccacatcatccaccgatgcggcagcgacctttgcgatccccgcgacatcgtccaacaaggccagaagaccgctcatacctcacccctttgcactgtggcattcatgggaccctgtgtagcctgcgggaggggaatcattcaagcgtgccgcatcgcagcatcgcgccgctcccccggagcaacagttaccgcaaacgccgtcagaggtgttaacgccaccatcaaggttttgcgctaacagtctgtgtttactctaatttcttctttttcccgaggttaatgatcgctataggctgcccctaagacagccttctcgtggagacgacagagatgaccatcaaagttggaatcaatggcttcggacgtatcggccgctgcaccctcgcccatatcgcgggcagctttcgcaacgatatcgaggtgatcaaggtcaatgcgaccggcccgatcgagacggcagcgcatctcatcaaatacgacagcgtgcatggccgtttccccggtcaggtcgatttcagcgaaggccgcctgaaccttggccgcggcgacatgcaggtgttttccacctacgacatggacacgctggactgggaaggctgcgatgtcgtgctggaatgcaccggcaaattcaacgatggcctgaaggcgaagaagcacctcgagcgcggcgcaggcaaggttctgctgtccgcacctggcaagaacgtggaccgcaccgtggtttacggcgtcaacgacgaggatcttctgtccaccgacaagatggtctccaacgggtcttgcaccaccaactgccttgcaccgctggccaaggtactggacgaggcctttggcatcgagcatggcatcatgaccaccatccacgcctacaccggcgatcagccgacgctagaccgccgtcacgacgatctctaccgcgcccgtgcggcagcgatgtcgatgatcccgacctctacgggcgcggccaaggcgctgggtgaggttctgccgaacctcaagggccgtctcgatggctcagcgatccgcgtgccgaccccgaatgtgtccgcggtggacctgaccttccgcgcggggcgcgaggtcaccgccgaagaggtgaacgccgccgtggcagaggcgtccaagggccatatgtcgcgcgttctgggctatgagcccgcgccgctggtctcgaccgacttcaaccacaccgaagaaagctccatctttgcgcccgaccagacccgcgtggtcgacggtcgcatggtgcgcgtgctggcgtggtatgacaacgaatggggcttctcggtccggatggccgatgttgccaccgccatgggtcgcctgaactaacaccttcctcgcgtgagggttgagattttacgcccggtcaggcatagctggccgggcgtattttattgggcttcccgcatgaccaacaccatcgccatcgccctggggctgttcctgatcaccgctttgacggtggacatcgtgttctttggcaccggtcatgtgctgtttttgggcaaaaagctgtttgagctgatcgagtggctcgctttctggcgctgaccacaaagcaaaaccggcccgcgcgcggcagaccggatccaagtgttccaaatggactggctggggcctagcgctggcccagacgctctgcgaggcgttcgcgcacaagaggcgtcacaaacttgctgacatcgcccccgaggcgcgagatttccttgaccagtttgctggcgatggcctgatggcgggcctcagccatgaggaacaccgtctcgatgctgtcatcgagcgcgcggttcatgccaaccatctggaattcatattcaaaatccgcaaccgcgcgcagaccgcgcacaatcacctgcgcgcccacatcgcgggcgcagtcaatcagcagattctcaaacgggtggacgacgatctcggtgccggtctgctcggtgagcttggcgcactctgcctcgatcatggcgacgcgctcttcgagatcgaacaacggtcccttgtcgcgattgatcgccacgccgatcacaagccggtctaccagcagggttgcccgccggataatgtcgatatgccccaaggtgatggggtcaaaggttccgggatacaagccaatgcgcatgggcccctcctgcctgcgtcacattcccgggcacgcaatcatgttgcgcgacgcaatgcaagtgcgtgagaatactgaatcttcagccagtgcataatcgccgccgcccagccgcgatttgctccctagtgtcccatgatcatgccctcaagcgcggttttctccatcgccacctcgttgagttgcgccttgaccacatctccaagcgagatgatccccaccagcgcgccatcttcgacaacgggcatatggcggaatcgcccttcggtcatcgtgctcagcgcctgctctgcaacgctgtcctgggtgcaggtcaccacgtcgcgggtcatgtagtcctcgaccttatgattgagacaaaccgaccccaccttggcgagctggcgcacgatgtcgcgctccgagagtatcccaacaggtttggatttatccggcgacacaacgactgtcccgatgccatgctcggacaagagctgcgccgccgcctcaatcgtggcctccggtgtgatcgtgacaacttcggcgatatctttggacttaaggatcgacttaacgagcattttgcgcacccttgaaattttctttcactccctcaaggtttgccgcaagatcacatcaagtcaagccttccaatcgctcaacctctgcgcgtatccccgccgagagcgcctctgcaaagcgattaagccggtcgctgcgctggtcgccctgatggcggacaaggtaaaaactgcgggtcaggctgaactcttccttcagcactttgcgcagggtccggtggctcggcagtgaaaaatcatgcaccacgccaagcgcgctgccttcggcaagcatcttgatctggacagagaccgaattggacgccagcgacacgcgctcgatgcccagatcattgaggtaatccaactcgcgatcaaagatcatgtccggaatgtagccgatcatgcgatggtcgcgcaggtgctcgagcttttcgatcgggtgattgtcgcgcagatagtggcgggtggccgccagatgcaggtgataatcggtgatcttttgcaccagcagcttgcccgcagttggcgcgctgacggtgacggccatatccgcctcgcgccgcgacaggttgatcacacgcggcaaggcgacaacctgaatatcaagatccgggttgtctttggaaatcgcggcacagacctgcggcaggatgtagttggcacatccatccggcgcgccgatgcggatctgccccgaaagcgtgtcactcgggccagtgagcgcctcttcgcccgcccgcatggcgagttccgccgcttccgcatgccccaagagcctgtctccggccgcgctcagcgcatagccttgcggtgattttacaaagagagatgtcttgagcgcggcctcaaaccgggccacccggcggcccactgtggcagggtccatcttgaggacccgccccgcgccagagaggctgctctcccgcgcgaccgccaaaaacactttcatatcgtcccattggggttccatctgacgggatcctccagccttcttcgcattctgctcatggttaacctaccttaaccatttgcgtaaatgcaaaacctatttgaagcctttcctcttttacgtctgtttttgcaatcctaggatggcggcgaccactgatcagaggaggactgcacatgcaggaactgacccattacgtgaatggtgaaaaagtcgccgggacctccggccgttttgccgacgttttgaaccccgccaccggtgaagtgcaggccaaggtgccgcttgccaccaaggcggaaatggacgcaatcatcgccaaagccgccgaagcacaggtggaatgggcggcaaccaacccgcaaaaacgcgcccgtgtgatgatgaagttcggccaactcatcaacgaacacatggacacgctcgcagaactggttgcccgtgaacacggcaagaccctgcctgatgcgcgcggcgacgtgcagcgcggccttgaagttgtcgaggtctgcatgggcacgccgagcctgctgaaaggcgaattcaccgacagcggcggaccgggcatcgacctttactccatgcgccagcctctgggtgtggttgcgggcatcacccccttcaacttcccggcgatgatccccttgtggaaaatggcccctgccctctcgtgcggcaacgccatgatcctgaaaccttccgagcgcgtgccgtccacctcgctctatctggcggagcttctgaaagaagccggtctgcctgatggtgtgctgcaggttgtgaacggcgacaaggaagccgtggacgcgatcctcgacaacgagaccattcaggccgtgggctttgtgggttccaccccgattgcgcagtatatctatggccgcgcggcgaccaacggcaagcgcgcgcagtgctttggcggcgccaagaaccacatgctgatcatgcctgatgcggatctcgacaaggcggcagacgcgctggttggtgccgggtttggcgcagcgggcgaacgctgcatggcgatctccgttgcggtgccggtcggcaaagaaaccgccgatggcctcattgagcgtctggtgccccgcatcgagaaactcaaggtcggcccctacaccgccggtgaggacatcgactacggccccgtgatcaccccgcaggccaaggcgcgcatcgagggtctcattgacagcggcgtcgagcagggcgcaacccttgtgaccgatggccgtggcctgacgctgcaggggtatgagaacggctattttgttggcccgaccctctttgacaatgtcaccgccgagatggacatttacaaagaagagatctttggcccggttctgtcgacagtccgcatggacaactacgaggacgcactgaaccttgtcaaagacaacgcctatggcaacggcaccgcgatctacactgccgatggtgacaccgcgcgtgactttgccaaccgcgtgaacgtgggcatggtcggtatcaacttcccgatcccggtcccgctcagctaccacacctttggcggctggaagaaatcggcctttggcgatctgaaccaatatggccccgacgccttccgcttctacacccgcaccaagactgtgacccagcgctggttctcgggcatcaaagaaggcggcgaattcaacttcaaagccatggactgatccccgaaaggttcatgttttggccgtccgggacctccgggcggccttttttgttggggaatgcgcgataagttgcgcaagcggcctgctcacgcaaatgtcaccccttcaaggcggggatggcactggcgcagctgccctggctttcatagtgtcgccatcaaaattcgagcactcaaagccacgaggatggatgcatgtccgacttcaccaaatcccgtctttctctgacgcgccgcagcctgatggcgggcgcggcggcaacacttgcaacaccggggcttttgcgcgcgcaatccaccgatgctttccccgcatcagagcccgcaatccgcgagcaaatcccggttcagcgcaatgtgtcttcgttccagcagcagcgctggcaggaccattttgagacgctgggcgtgggctgtctcttggccgacatcgagagccgcgcgctgcattactggggcggcgatggcgagacctatctgctctttccctcatctgtcccgatgagcgaagagctgacccgccggggctattccaagatcgtgcgcaagcgcgaaaacccaagttggacgccgacggccaacatgcgcgagcgcgatccctcgctgccgcagcgtattgaaggcggcgagccaaacaacccgcttggcacccgcgcgctctatctcgactggcctgcctatctggtgcatggcacccacgacacccgcaaaattggccgtcagagctcttctggctgcatcgggctctacaatcagcacgtcgagaaactctatccgctggtcaaagtcggaacacaggtccgcctgctctgatcgcccgcctgaacgttaggctccggcatgaagaggcccaagaattagccgcgtctcccaaaggggacgcggccttgtagtctttgatctgaagtccgcgagacccggctcaggctgcggaaattccgagactgcgcggggcgttgccgtcgatgtaattctggaacgcgcgctccatcagacgttcaaaatcgcgggtgtaggatttggtatcaaacagcggcgagttctcgtgcgacgccgccagacgcttgcgaatatccgcaagatagtcaggatcttgggcaatgcgcagagccacttcgtaatatttcttctcgctatgagtgaccagatcctcaagccccgctgcgctgaggatgctgcccgccacccgcgcggcgaattgctcgccggttttggtgacaacgggcaagcccgcccagagtgcatcactggcggtcgtgtgtgcgttgacgttgaaggtatccaggaaaagatcggcgtgtttcaggcgcgccaggtggtactccggctgcatccgcccggtggggatgatgcgcgcaccatcgacaccgcgcgactcggcttccttgcgcagacggtcgatgatctctgcctttgagacatagaaccacagcacgctgtcgggcacttctttcaggaggtccatccagatgccgaactcgcgcggcgtgaccttgtaggggttgttgaaggaggagaacacaaacccctcttcggggagatcatggctggcccgcgtgtctgcaacctcggcgataaagcgcgactcgtcattgggctggtagcaattgggcatatagaggatgttttcggtatagtgcttgcgcaggtgcgacgggatcgtgatcttgtcggccaccatgtaatccattgatttcaaaccggtcgtgcccggataccccagataggccacctgcacaggcgccacgcgactgttgaacatgtccagccgcccattctcggtaaagcccttgagatccaccgcaatatccagagcatccccatgcgccagatcaacgatctgcgcagtgttcagagtgcggatatcgcgaaacacatcggcgctgcgacgcgcgcgctcgtgttcgtggtcccgcagcttggagccatagtcgtagatatagatctcgaacttcgatcggtcgtggttttccagcagcccccccatgagatgcatggtggcgtggttgtagaagtcgttcgagaaatagccgatccggatcttttcgccggccgcgcgctcccccttgaagatgggggctttgacggggttgcagaacttggaattgatctgggcgatggagcgctgtttctgaaacgccgcatcatcgcaaagcgacaggaaggcaaaaggatcggacagcacgttctggttcttgaactgcttgaggtaggtcgggatcttgttgaaatcatcccagcgcgcgcgatgggctttggtatgcatcatccgcgacagggcgatatgatttttgggatcgaatttcacagcaatttcaaagtaatcgatcgcctcttcaaatttctgaaggcgcatcagaagggtgccgatcatgccgtagtggctgccgttggtcggctccagcttgacggctcgcatcaggctccccagcgcgtccatcatccggttggaatccttcatgagcacttcgcccatcagcgaatggagccgcgcatcctgtccctcgagcgcaatcgcctggttgatcaccgcctcggccttttcgttctcatgtttcaggatgagcgcctgagccttgcgcagaagcttggtcacagtgtccttggtctgctcccctttcgcccggctgctgcgcagcccgtttttcatttcataggcgaatttcgcgcgttcctgcgccttgacggaattggcgaatttttcgaactcggggaactgcttcttggtgggctgcatcaccgcgagttttggggtttgattgggctgcgacacgaggatctcgctccttctcagactataggtttgcccctatcctatgggaaacaggagggcctttggtccaaagtagtggcgcagaggtcttaaaatttccctcaaattccacatgaatgcatcgaaaaacaccccaattgagcgctgttttgcgccgatgggcgcaacggtgcaggaccatcttgcagttgtgcatattgaagtgacgccccgagccgcgtaagaaataaacagttgttcaattcttgtggcgccgcatgcggccacatttgaaacggggaggagaacccatggacttcgcaatgacagaagagcagacggccatctttgacatggcttatggctttggccaggagcatatcgcgccttttgcccgccagtgggaatctgaaggcaccatccccaaggatctgtggcccaaggtgggtgagctgggctttggctctctttatgtaagcgaagagtccggcggctccggccttttgcggctggatgccaccctggtctttgaggcgctgtcgatggcctgcccctcggtggcagcgttcctgtcgattcacaacatgtgcgccaagatgctcgacatgtttgccagcgacgatttgaaggcgcgcgtgatggacgacgtcatgagcctcaacacggtgctgagctactgcctcaccgaaccggggtccggctctgacgcggcggcgctcaagacccgcgcgagccgggacaacgaaggctatgtgctcaacggcaccaaggcgttcatctccggcggcggctattccgacgcctatgtctgcatggtgcgcaccggcgaggacggccccaaggggatctccacgctctatgtcgaggatggcacgccggggctctcgtttggcgggcttgaggacaagatgggctggaagagccagcccaccgcgcaggtgcaatttgacgactgccgcgtgccggcgggcaatctcgtgggccaggagggcgacgggttcaaatacgccatgaagggccttgatggcgggcgtctcaacattgccgcctgttcgcttggcgccgcgcaagccgggctaaatgcgacgctgcaatacatgtccgagcgcaaggcctttggcaaatccatcgaccagttccaggggcttcagttccgcctcgcggatatggagatcgagcttcaggccgcacgcaccttcctgcgccaggccgcatggaaactggaccagggcagcccggatgccaccaaattctgcgccatggcaaagaaattcgtgaccgaaaccggctccaacgtggtggatcaatgcctgcagctgcacggcggctatggctatctcgcggattacggcatcgagaagctggtacgcgaccttcgggtgcatcagatccttgaaggcaccaatgagatcatgcgcgtgatcgtcgcccgtcatatgctggcggaaaaccactaagtgtctcaggaaaggaccgccgccatgagcgacatccatatccgtatcgaagggcgcgcagggcgcataacgctcacccgcgaaaaggccctcaacgccctctcttacgacatgtgccttgcgatcgacgctgccctcaaggactgggccaaggacgatgccgtggcgctggtggtgtttgacgccgctggcgacaaggccttctgcgcgggcggtgacattgccgagctctacgagacgggaaccaagggcgattttgcctatggccgcacattctggcgggatgagtaccgcatgaacgcgcggatctttgagtatcccaaaccggtggtgagcttcctgcagggctttaccatgggcggcggtgttggcattggctgtcacggcacgcatcgcgtggtgggcgacagctccaaactctcgatgcccgaatgcgggatcgggctggtgccggatgtgggcggctcgcttctgctcgcgctggcgccggggcgcctgggcgaatatctcggcaccaccggctaccggatggatgcgggcgatgcgatttatgctggctttgccgatcactacatccccgaaaccacctggcctgcgctgatcaagacccttgaggagacaggcgatgtcgcagctctcgaggccgccgcacagcccgccccagagagcaagctgcaggcgatgcagggcgatatcgacgccacatttgcaggcgaaaccgccgccgacatcctgaccgtcctgcgcgggcgaaaggacagctttgccgccgacaccctcaaggtgctggaacgcggtgcgccgctctccatcgccaccacggtcgagatgatccaccgcctgcgcagctccactgcgaccatgcgccgggccttggatctggaatatcgtttcacctatcgtgcgatggataagggcgaccttctcgaaggcgtgcgcgccctcatcatcgacaaggacaaatcgcccaagtggcaatatgccgacggcaacgtgcctgcggtcgccgtgagccagatgctccaaccgcttggagccgaggcattgagttttgaggaggagagctaagatgcaaatcggatttatcggactgggcaacatgggcggcccgatggcggccaatctcgccaaggcaggccatagcgttaccggctttgacatggcggatgtctcgatcgaaggcgtctccctcgccaagagcgcggccgaggccgcaacgggcgcggatgtggtgatcaccatgctgcccaatggtgacatcctgcgccatgtcgcctccgagatcatccccgccatgaccaatggcgcggcttttgtggattgctccaccgttgatgtggacagcgcccgcgcggtggcgcaacaggcggcagaggccgggcttctggccgtggatgcgccggtctccggtggcatcggtggggctgcgggcggcacgctcacctttatggcgggcggatctgaggaggcctttgccaaggccgcaccgctctttgatatcatgggccagaaggccgtgcattgcggcgactccggcgccggtcaggccgccaagatctgcaacaacatgatcctcggcgtcaccatgatcgccacctgcgaagcctttgcgctggccgacaaactcggccttgatcgccagaagatgttcgatgtggtctcgacctcctcaggctacagctggaccatgaacgcctattgccccgcacccggcgtcggcccgcagtcccccgccgacaacgattaccagccgggctttgccgccgatttgatgctgaaggacctgcgcctgtcgcagcaggccgccggcagcgccgatgccgacaccccgatgggcaaactggccgaagcgctctacagccagttcgtcgacaaagaggacggcaagggcaaggatttctccgccatgttgccgcgctttgaaaaacgcggccgcagctaggacgcccccatctggatgagcgccactcgcgtggcctcatccgccgggaacatgcattcgatcctgagctcggagagggcaatatcctccaccgtgccaaactgcgacatcgccgaaaaaaacgagagcacctgcgcgccgatctgatagcgggtggggatcatggcgggcaatggcccggcctctggcacctgccccgcgccccgggcgcgcagatcctccacatgggcctcgatcacgctgtcccggccaaaatgcgccagctcgctgcgcaaacgttgcagggtcagctgctcgacctcccgaaggttgaggatattcgaacgcagcccgctattgtgcaagagcgcctccagcaggctgtcgcccaagtcgatgcccacaggctgcaacagcattcgggcaggcgcattcgccgcttccagctgccagtgtcgatccagagccatcgccggatatggcgcgtggcgctccagcatccacatcaccgccgcccgcaccggggccagctccgcgtcctccagatcacgcgccccataggcaggcgcaaaccccgccgctgtcagcagcgcgttgatctccgtctgtggcagcagcaactcccggcttaaacgcagcaccatgtcccggctgggccgcgcacgcccggtttccagaaacgacagatgccgcgccgagacctctgccgagagcgccagatccaactggctcatccggcgcagctgtcgccagtctttcagctgtgttccaaacgcgctcatccgcccctcgctttttgacattcctagccgatccgcttgtgaaatacagttacctccgaggtaattgaatcccttccctgcatcggcgagcctcccggcaagtttgcataaaagaggaccacatgatgacagttgattttgcagcacggctcctgcgcgtcaccgccgctgggacggcgcttcttgggatgatgctggtgctggctccgcacagcccgctcggccctgccggtctgttctttgtcgatctggccttcctgcctcttgatcaggcacaacagatcaatgacgaggtcgcccaactgatgatggcgatttcgggcgggcttctgtgcggccttggcgtgttgatctggcagattgccacacatgtgctgcccagcgacccaaaacgcgcgcgtcagctcctgatccccgcgctcctcacctggtatctgcccgacagcctcggctccgccctctcgggcgccagcttcaacgtggtgatgaacaccgccttccttgccctgctgttggcgccgcttctgctgctcaaaccagcatccggccagaagctctcgccacaaggctgacccctacacacagtgttccaaacaaagagaggcgcacccgcgcccctcttcttctaaccccaaatatcccggggagcgcgaggggcagcgcccctcgcccagagatcactccgccgcgaccttcttgcgcgcctgcgcttccagcatcggcttcagatagcgcccggtgtgactgcgcggctcttcggcgaccttttccggcgtccccacagcgacaatctcgccgccgccatcaccgccttcggggccaatgtcgatcagccaatcagccgtcttgatcacgtcgaggttgtgttcgatcaccaccacggaattgccctgctcaaccaattcatgcagaacttccaagagcttgcgcacatcctcaaaatgcagaccggtggtcggctcatccaggatataaagcgtgcggcccgtcgaccgtttggcgagttcctttgagagtttcacccgctgggcctcgccgcccgacagtgtggtggcctgctggccgaccttgatatagccaagacccacccgcatcagcgcgtccatcttgtcgcggatcgtcggcacggcggcaaagaactcctgcgcatcctccactgtcatatccagcacatcggcaatgctcttgcccttgaacttgatctccagcgtctcgcggttgtagcgcgcgccctgacaggtctcgcaggtgacatagacgtcgggcaggaaatgcatctcgaccttcagcaccccgtcaccctgacaggcctcgcagcgtccgcccttcacgttaaaggaaaaccgccccggtttatacccgcgcgccttggcttcgggcaggccggcaaaccagtcgcggatcggcgtgaaggccccggtataggtcgccgggttcgagcgtggcgtgcgcccgatggggcgctggtcgatgtcgatcaccttgtccagatgctcgagccccttgatggtttcgcaaggcgcaggcgtctggcgcgccccgttgagacgcatcgaggcagtcttgaacagcgtctcgatggtcagcgtggacttgccaccgcccgacacaccggtgacgcagacaaatttccccagcgggaattcggcggtgacgtccttcaggttgttgccggaggccttcaccaccttgatcttcttcttgttgcccttgcggcgcgtatccggcaccgcaatctcacgcgttccggccagatactgaccggtgaccgaacccgcatcaccctcaaccgtggcgggcgtgccgtggctgacaacctgcccgccgtgcaccccggcgccgggaccaatatcaaagacgtaatcggcctgccggatcatatcctcgtcatgttccaccacgatcaccgtgttgccctgatcgcgcaggttcttgagcgtggtgatcagccggtcattgtcacgctggtgcaggccgatggagggctcgtccaacacatagagcaccccggtcaggccagagccgatctggctcgccagacgaatccgctggctttccccgcccgagagcgtgcccgcgttgcgcgagagggtcagatactcaagccccacattgttgaggaacccaagacgctcgcggatttccttgacgatggcgcgggcgatctcctgcttttgcgggctgagatggctcggcacctcttcgatccacgccagcgcctcgcggatggatttctccaccacctgccccacatgcagacgatgctcggcggggcctcccgccgggccgattttgaccgccagcgcctcttcgcgcagacgatacccaccacaatggccgcagtcgcggttgttctggtagcgctcgaactcctcgcgcacccagttggaatccgtttcgcggtagcggcgctccatattggggatcacgccctcaaagacgcgcgtcacattgtagacgcgcccgccttcgtcatagcgaaaggcgatttcctcgtcgccggagccatgcaggaacacctgtttcacatgcgcgggcagatccttccacggcgtgttcttgtcgaactcatagtggttggcgatggcctcgatagtctgcaggaaatagggcgatttgcccttgcgccagggcgccagcgccccgtcataaaccttgaggctctgatccggtaccacgagacgttcgtcaaagaacagctccacgcccagaccgtcacaatgcggacaggccccaaagggcgcgttaaaggaaaacagccgtggttcgatctcggggatggtgaagccactgacgggacaggcgaaattctcggaaaaggtgatccgctccgggtcgccctcacgcggggcggtctccagaatggcgatcccgtcggccagatccagcgcagtgcgcaagctgtccgccagccgggtctcgatgccctcttttacaaccagccggtcgaccaccacgtcgatgtcatggcggaacttcttgtcgagcgtgggcggcgtatcaagatcgtgaaactccccgtccaccttcacgcgctggaacccctgtttcctgagctccagcatctcttttttgtactcgcccttgcggtcgcgcacgatgggcgccagcagatagccccgcgtgccctcctcaagcgtcatgatccggtcgaccatatcctgcacctgctgcgcctcgatgggctggccggtggcagggctgtagggcgtgcccgcgcgggcaaacagcagtcgcagataatcatagatctcggtgacggtgccgacggtcgagcgcgggttcttcgatgtggtcttctgctcgatggagatcgcaggcgacaggcccgagatatgatccacatcgggcttttccatcatatcgaggaactggcgcgcataggcgctgagggattcgacatagcggcgctgcccctcggcgtagatggtgtcaaaggcaaggctcgacttgccggaaccggagaggcccgtgatcaccaccagttcatcccgcgggatgtccacgtcgatgttcttgagattgtgctcgcgcgcgccgcgcacctcaatgttcttcaactcagccatattgcccccaaactttgaactacacataggtgagccgccgcgagtctccaagagaaaaagaggaacagagggggaacgcgcaaatctgtcctgacagaaactgtcagaccgccccccgcgccacccgttgccggtgcagcgcaagcgcctgatgcaccacggccccggccaaaagcagcagcgccacggtcagcaccagcgagccatagcccccataggtcagcacggcgacaaacagcggtgtgccgatggcattgcccatgttgcccgcctgcgccatggcgccattggcctctgattgcgtcgaaggcgtgtcattgagctgcggcacagaagcaaagctggccccctgcaccagcccgaaccccgccgccaagaccatgcaggccagccagtaccccggcatcgcccaaagccagagcatcgccaccgtgccgatgaggaacccaagctgcaccactttgacccccgaggtcacgcgcagcaggccagccccaagcgtcagagagaccacgatcgacaccagaggcatcgcccccatcacatgcgcacgctggctctcggcgatatagggcggcagcaccgtcagcaccgccacaaagcagcaggtataaaagagccagcccgcggcaggcgccagcttgtgcggcgatcggtagatattcagatgcagcgatggcaaggcgcgcagatcaggatagctggcgcgcggcggcaccggcaagtcgcgcagcccccaatgcaggatgagcgccagaaggcccatcatccccgcatgcaccgcaaaaagcgcagggatgccccgtgcctcgacgagcggcagcccgaaccacgtcaagagcgcaaaggcaacgccaaagaacgtactccagatcgtcagcgccaccccacgcgccgggccacgcgcgaggatcgccatcagcgtcggcgccgcaacaaccacgcccagatgggagatcccctcgaccatgcgcgtgatgagaaacaggccaaagggcagatgcagcgcctgcaggcccgagacccccgcgccaagcaccagcgacagaacaagcgtacgccgaaaaccgatggccgacacataaagccccgccacaacgccaaaaatgatccccagcacccccaccagcgacaccgtccagcccatcgccgcgcccacaccgggataaagcgcaggcagctggtcaaagatcacggcgatcttgccgtattgcgccgccgcgccgaggcccgcggcccagatcaagagcaccatgacccagttcgtcccctgcccctgctgctgcatctcgtcgccctcgaccctgtaaagaaaatgagcggccaacttatgcctcccggctccggggcgccagatcgataacgcgctattttgtacccacacaaaccccacaaaaaaggccgggcatgagacccggcctttcatcaaacatatgctggcgaaatcagatgtggatcacccggtcaaaggcgtccagcacgctttcgtgcatcatctcggacagagtcggatgcgggaagaccgtattcatcaggtcttcttctgtggtttccagctggcgcccgaccacatagccctggatcagttcggtgacttcggcgccgatcatatgcgcgcccaacagctcgccggttttctcgtcaaagacggtcttgatcaggccctcgggctctccgagcgcgatcgccttgccattgccaataaaggggaaacggcccactttgaccttgtagcccagctccttggccttggcttcggtgtagcccacagaggccacctgcggatgacaataggtgcagcccgcgatgctttcgggcttcaccggatgcgcatgtttgcccgcgatcagctcggccaccatgacgccctcgtggctcgccttgtgcgcaagccagggggcacccgcgatgtcgccaatggcatagagcccgtcgacacccgtgcggcagtattcatcggtgatcacatgggtgcggtcaatcttgacgcccagcccctcaagcccgagcccctcgacgttgccgacgatccccaccgcggaaatcacggtgtcaaactcgtgtttttcgaccttgccgcccacttcgatatgcgccgtgaccttgccagaggcgcgatcaagctgcttgaccatcgccttttgcatgatcttcatgccctgcttttcaaaggccttcttggcgaatttggagatttcctcgtcctcgacgggaagcacccgttccatcacttcaacgacggtcgtatccgcacccaaggtgttgtagaagctcgcaaattcgatgccgattgcgccggagccgatgaccagaagttttttgggcatgcgcttgggatcaagggcgtgcttgtaggtccagaccagatcgccatccgcctcgaggccgggcagttcacgcgcccgtgcgccggtggcgagaatgatattcttgcccgtcagctcttcggagcccttgtcggtcttgaccgcgaccttcccctttgcggggagtgtggcttcgcccatgatgacgtcgatcttgtgcttcttcagcagacctttgaccccggacgagagctgcttggccaccccgcgcgagcgtttcaccacagcgcccagatcatacccaatgttctcggccttgagaccaaaatccttggcccgctccatcaggtgaaacacttccgaggaccgcaacagcgccttggtggggatacagccccagttgaggcagatgccgcccaggtgctcgcgctcaaccacgcaggtcttgagcccaagttgcgaagcgcggatcgcggcaacatagccgccggggcctgcgccgattacgatcacgtcataggatgctgcggccattgtgttccctcatgaactaagatccaaaaactagtttaccgttaaactaatttctcacacgccgcaactgtcgaagcgggcgcgccgccctgcccctgctgtggcggcggctaagaccctctgaccctaacaagcaagcctacaggttcaaccaaaaaccccatcctttccgcgcgcgtggcaacgtcttgcgcgtgtctcagatccgcgcgccacatgaaaaaggccccgccgtggcaatcggcagggccttggtcacttagtcaggtgcctgtcaggcgtaggcctgcagctctcgcacggtagagccatagccgcccgcgctcacatagtcacgttcgggggcggtgctgtgacgcgcgagcgcatcattgcgataggggaagcggccaaagagacggatcacctcacggtgcgcgcgcgcatgcaggaggttctgcgcgcccgtcttgtcgagccgttcgtggatcagccgcacgcagcgttcctgatcacagaggctctcggagtgcatcataggcaggtaaaagaattgccgcgcgggttcgttgatcttgagatcccatttgcgatccaccgcagccttggccaccgccagcgcgatatggtctgattcaaaggctttgccctgaccacggaacatgttgcgcgggaactgatcggtgaggatgatatacgccaaggtgccgctgggataggtgagccagagcgagtagctgccttcgcaggcgttgatccaggcctgctcgaaccgcttgcggatttcagcatccaacgcatcatcttgacggtaccaccctgattctccgacctcatcgagccagaatttcaggatctcttcaggggctgccattggtttctctccaccggctgtaaaacgttttccacacacccatcaaaagcctgattcaccccccaagcacaagtgacgttacgttacaaaaaaggccacctccgtcacttttgtgaagagatggccaatttttcagcaggttattgccgtcagcccgtggttgtggcgctgtcttgctcttcgagctcggtttcgatggcgtattcctgcgccacctctaccgcgaccgaggtcgcggtcgggctcatggcgggcatgacaccggtctcttcgactggaatggtcgcacgctgcgttgcgcgatacccggcataaagaaccaacacgcccagcaatatcgccatgaagaggaagaacccgttgggtccgaacatcgcgtccgacatcagccagccgatgatgaccggcccgctacaggcgccaagcccgttgataaagatcagcccgcccgaggcagaggccatatcgtcgtgatcgagaaagtcattggtgtgggccaggagcaaggaatagagcgggttgatcagcccgccgatcacaaaggcggccagcagaagcaggctgaacgtgcccccaagcagcatcgccagcaccgaggtcaccccggcgacccctgccacgatcatgatcagcacccgtcgatccatccggtcggacagcagccccagcgggaactgcataaagagcgcaccgacatagaagctcgccgcaaagagcgaaacctgatgcagctccatcccagcctcggtggcatagaccgcagacataccaaactgcgccgagaacacgccgccaatgaggaacatccccacacacccaaggggcgaggcatgcatcaattcgcgaagcgtcatccgcttggccgtatcaaaggcgggggtcggcgaaatcgacagcaaaatcggggcgaaggagatcgaaaccgcgatggaggcgatcacaaacggcagatagcccgccgggtccccgatcaggatgaaaccctgtgcggccaccagccccagtgtcatcacgaccatatagagagagagcgccttgcctcggttctggttgtcagccgcattgttgagccagctttcggcggtgacatacacgccagaaaagcagaaccccacgaccagacggcccagcatccagacaatcgggttgggcagcgcgggatagatcaccatcaccgccgaaatcagcgaggccagcgccgcaaagacccgcacatggcccacacgccggatcatccccggcgccacccaggaccccaggagcaagcccacaaaataggtggacatcaccagcgacatggtgagcgcggaatagccctcgatgccaccgcgcacacccagcagcgtgccttgcaggccgttgcccaacatcaaaaggccaatgcccagcaaaagcgcccaggcgctcgacagaacttgcagcatgacgtgttctccttcggtccgtgaggagcccgcagcacagcggcatacgggaagtattttcagtaaaaccggcccgaggccgcggtgggctgtcagaggggcaaagggccatcagccccagcacaccccaagggtctggttatgctctcattcagggtgccctgacccggcaattccgactcggggcggtcttagggcgacctttcgcacagtgacaacatgggtcaaccccttgccggtccccgacacagcgccgtcaacgggccgcgatcagggaatgagcagcgaggcatccccgtaggaaaagaagcgataccgctcctttaccgcatgcgcatagatcgcgcggatgcgatcctgccccatcagggcagagaccagcatcatcagggtcgattttggcagatgaaaattcgtcatcaacgcatcagccacccggaactcgaaacccggatagataaaaatgtccgtctcgccttcccagggtgtgatggcgccgctttcgcgtgccgcgctttcgatcaggcgcagcgccgtggtgcccacggggatcacccgattgcctgcggccttggtggctgcaatctcggcggcggcctccggcgtcacctggccccattcggcgtgcatcttgtgggtggtcacatcctcgaccttcacgggcaggaaggtgcccgcgcccacatgcagggtcacataggtaaaggtcacccccttctcggacagcgccttcaggagcggctcgtcaaaatgaaggctcgcggtgggcgccgccaccgcgccggaattgcgcgcccagacggtttgatagtcagtcttgtcctgctcgtcggcggggcgtttggcggcgatatagggcggcaggggcatcgcgcccgcctctgccagcgccgcgtcaaaatcatcgcccgcgaggttgaaccgaagccgtccctgaccatcgaccacatcgacaagctcggccgaaagcgcatcggagaaccgcagggtctcgccgatcttgatttttttcaggggcttcaggagacccgcccagctgccatcggcctgcggctccagaagcgttacctcgatgcgtgccgagaccggtccctgcgctgagttgcggtggcgctgaccgctgagacgcgcagggatcacgcgggtgtcattgagcaccagccggtcccccggtgccagccagtccaaaaggtcggtgacgcgcccgtccgaaatccggtcctgctctgccaccagaagacgcgccgaagagcgcggcacggcagggcgtgtcgcgatcagctcttctggcaggtcaaaatcaaaatcgcccagtttcaaggactctgtcatggtctgctcaccgtctgtttcaccaactgcgtcgccgcttgggatgtcgtctgtcttgccgggcggattgccgttcgtcgtgccacctgttgcaccgtccgcgcaggcccttgcaccgccgatttcatcttgggccgcgcgatactgcgcgcctgcgcaaaagtccatggggcatcggcgcgcgtgacgcgatctttgccctgcaaagcctgcctagcgggcctcgcggcggcgctcgcgttcttcgcgcagctcttcggcggtctggttctgctcgtcctccggcaagggggccgctccgggcgcccgtggcgcctcgccgcgaaagatctcgcgcaggaaccccggcgcgatgcccgaaagcgggttcaccgacaccaccgggtcctcggccttgcccttcagggtgaatgagaatccaaacaacccctcgcccttgcgcgtcagcacgctgccaatggcgttgaccagatagatcggcgaaagcaccccgcgcatgttcatctggctggtgctgaggtcatagaccccatcgagcgaaatccccatcgacggccccaccgccgaggacttcaccagcgtgagatagcgcgacccaaggcggaaatcggcctccatcgcggtaaagaggatgccctggcccgacagctcatcaaagagccccacaagactgagcgcgttgatcagcgccgcaatggcgggggtgcgttttacacggatgttcttcacgcggagctggccgacatattcgccgggatctgaagccggcagcatggtcatctcgaaactgccgccatagccgttctgcatcacctgcgccgcacgaaagaccccgcccgcatccgccgagcgcagccgcatcgccagccccccggactgcggcaccaccaccccttcgaccggggtgagcgtgttgaggttgccgctgaaggccccgttgaacccgccaagcgtgtcaaaccgcccctgaaagcgcgtcaacgccagttccttggtgacttgcagccgatcaatggccagcgagatcggcgtattgctgccaccgccaccagagccgccctccgcgcggctgtcaaagggcgcgcgctcaaggtcgatccagcccccggtcatcgacagcgcaggggtggcgtcgccccgcccgcgcaatgtcaccgcccccgacagccagtttccaagcgacacggccgagaactgcgcttgatccagcccgccatccggctttaccgtgatccgcccggccgcgcgcaagccattggcctcgagggtaaaactctcgatcgatggcgtgtccctcagtacagtttcaaacgagagtgtgccgctgctgttttcggccttgcgccagcctacctcgggcagcgacaggccaatgccgcgtagatcgctttgcaccgagagcgcgaccggctcgccggggggcagaaccacctcgacctgcgcctgcccctgcccgcgcaccatgccttcgggcagcccgatgttgagcgccgccaaggtgcgcggcgagagttcgatctcggcctcgatggtgccatcgggtgcatttccggggcggataccctgacgccagcgcgcctcgattggaacaccggcaaaaaggccgggccccgccaccgtgacatggtgattgtcccccgagatctgcaacgcctcggactcgatcggatagcccggcaccaggacctcactgcgggcctgcttgatttggccagcgtagtgatagtcaatctccgcgacgttgacccctttcttgagcggcatcgcagcggttgcgctcaggtcgacctcacccgtgccaagcgccaccggaaggttcaccttgctcaggatcgacaggggctcgcggtccagaagcgacagcgccgccagcgcgggccccgcgagttcggcgcgcaggatcccaaggctgttgtcgcccttgagcgacgtatccgggatgatgaaggaagtccctgccacatccatccgcccgcctagatccgcgtccacgccgccctcggtggccgtcaccaccaggcgccggccatagatactgagctgccccgccgcttgggtcagcggcggatagaacttgttgaaccgcacctcgccgttcagaaatccaagatccagcgccacaaagggcttttgcccatcgcgcccacgcagggcaaactgcacgtcgtggatgtctccggcgagcacgttctctgtaaaccacgcccgcggctttggcggggcggagggcggccacatttccttgaccaccgccacatcaagccgatccgccgcgccttggagatcatagtgccagcctgtttcgcccgcgcgcacatcaccacgcaacagcacgtcggtctcgccctgctgcaccagcgcctcgccaaggcgcagccggaaaggttgcagctccataaggaaatcggcctgcaccccggagaacgccagaggttcaggataaaggcgcagcgggttgagcttgagatcggaaaagctcagctggcccacaagctgcgtcagccgcccgtcgcgcacgcccaccagctcggcgcggccttccatctggccactgatccagccgctctccaccgagaggcgcgaaaaggccagctcctgacgcgcaggatcaaaggtgaaatagctctcggccgattgcagggggatgggtttgagctggtcattgggctggatcacaccgcgccccacctgcaggctcgcattgagcggacgcaacgcgccctcgctgtcgaccgcaccacgcagcgcgcctgaaatgggtgcacgcagcacatccagccagccaaaggccgggctctggctggcgatgtcactgctgggcacctgatccaccaccaccgcaaattccgctgcggtatccccgatgtcggattggtagttggcctccacggtgctggcatactcgcgcccgctgagcaccgagaaacccgcatcgatgctgacacgatcgcccttgcgcgacaacagaaccgcgccgccatccagcgtccaggcgcggtcgatccgacggtcgatataattgagcgtcaccgcctgcgtttccacctgcgtcaccgccgacaggatcggcagttccagctgacggtcccaggcctcgatgagttgcggcaggttgcgcgcttgccgcaacggcgccgccccatccgaaaaactgagcgccaccgccccgtcgctgcccgtttccagggtcgcaaacagccccgacaacgaaatcagcttgggccggagttgcccgcgcagcaagggccgcatcgccaaggccgcctgcgcgtcctccagatgcacagccgggctgccgtcgggataaaacagcgtcacatcgcgcagcgaaagacgcggccgccagccccggcgcaccaccagctcgatctcaccgaactcaatctgaagcccgcccaaatggcgctcgatgcgccgctcggcctcgctgcgcagccactcgggcgcatccagccgcttgtcgagcagcacccaggccgcaaccgtcaaccccgccaaaagcgccagggtccagaccgtgcttttccaaaggcggcggcgccaccggttgcgccggggctgtgccgtgttctggcccatgtcagacgcgcccgcgccagtctcctgcacccggttgccgcccgcttcggacgcaggctctggcggcgcggccacgatatatggttttcctttgtccgacatgatctatgtatggcccgcaggtacaattaaacttgcgcgaacccttgaggagacccaacacatgctcgaaccctctgacctcgcccccgcgttcactctgccgcgcgatggcggcggtgaagtttccctttcggacctgaagggtcaggtcgttgttttgtttttctatccccgcgatgatacgccgggttgcaccaaggaatccattggattttccgaacacttgcaagcctttgccgatgcgggcgccgctgtctatggcatctcgcgcgacaccgtggccaaacacgacaaatttgtcgccaaacatgggctcaccgtgccgctgttgtcggatgccgaaagcaccatgtgcgaggactatggcgtctgggtggaaaagaacatgtatggccgcaaaagcatggggatcgagcgctcgaccttcgtgatcgaccgcgacggaaagatcgcccggatctggcgcaaggtcaaagtgcccggccatgtcgaagaggttctggaagccgtcaaagagctctgaggaccgacggcgcggcctcaggccggaggctcaggagaggagctcaggctctgggctcagaagaggggcttagcggggtcacgctcgcccctttcgctcggacggaggccctcccgccccttttcaaagatgtggcaaagccaacccgaaaagcgttgggccgggcggattgcattgtccccgcaaccggcccggcagagatagcgcttgctgcggaaatgggcgtcgccgatcaggcccccgtcacccatgagccctatcgccaatgggtgatcgaggacaatttctgcgccgggcgtccggattgggacaaggtcggggcgaccttcaccaatcaggtccacgcctatgagacgatgaagatccgtatcctgaacgccgggcaccaggtcatcgccaatgcgggcgagctattgtcctgtgagacgatcgcggactgcatgcaggatcccgacattcggtccatgttcgagaaggtggagacccaagagatcgcgccctatgtatcgccggtgcctggcatcacagcggacgcttatgtggcgttgattgcggaccggttctcgaacccagccatccacgacaccacccggcgggtggcgttcgacggctcttcacggcacgcgggctttatcctgccgatcctgcgtgacgcgctggctgcgcggggtccggtcgatggtctcgctctggtcgaggccctctgggcgcggatgtgcgctgggctgcgcgaagacggaaccgagatcgaagccaatgaccccaactggccgcagttgcaacaagcggcgcaggccgcaaggaccgcccccgaggtctggctggcgcagtccgaatattacggagatctcgctcaggagacgcactttgcggaccggttctgccactggcatgcactgatctggagcaaaggaacacgcgaggcgctccgttcctacacgactcagatttgacctcgcgcgccccg

SEQ ID NO: 2 - DNA, 1080 bp, Artificial Sequence
  16S ribosomal subunit nucleic acid sequence
ctggctcagaacgaacgctggcggcaggcctaacacatgcaagtcgagcgggatcttcggatctagcggcggacgggttagtaacgcgtgggaacgtacccaaaggtagggaatagccactggaaacggtgagtaataccctatgtgcccttcgggggaaagatttatcgcctttggatcggcccgcgttagattaggtagttggtggggtaacggcctaccaagcctacgatctatagctggttttagaggatgatcagcaacactgggactgagacacggcccagactcctacgggaggcagcagtggggaatcttggacaatgggggcaaccctgatccagccatgccgcgtgagtgatgaaggccctagggtcgtaaagctctttcgccagggatgataatgacagtacctggtaaagaaaccccggctaactccgtgccagcagccgcggtaatacggagggggttagcgttgttcggaattactgggcgtaaagcgcgcgtaggcggactggaaagttgggggtgaaatcccagggctcaaccctggaactgcctccaaaactatcagtctagagttcgagagaggtgagtggaattccgagtgtagaggtgaaattcgtagatattcggaggaacaccagtggcgaaggcggctcactggctcgatactgacgctgaggtgcgaaagtgtggggagcaaacaggattagataccctggtagtccacaccgtaaacgatgaatgccagtcgtcgggtagcatgctattcggtgacacacctaacggattaagcattccgcctggggagtacggtcgcaagattaaaactcaaaggaattgacgggggcccgcacaagcggtggagcatgtggtttaattcgaagcaacgcgcagaaccttaccaacccttgacatcctcggaccgccagagagatttggctttcacttcggtgaccgagtgacaggtgctgcatggctgtcgtcagctcgtgtcgtgagatgttcggttaagtccggcaacgagcgcaacccacatccttagttgccagcagttcggctgggcactctaaggaa

SEQ ID NO: 3 - DNA, 2211 bp, Artificial Sequence
  hypothetical [Silicibacter sp.] (+)strand
atgcggctgaatgatgcggttgacgctgtcacgggcgaggttttccgggacggctggagccggatccggggctcgatgcaggggctgcatgtcgccaagcagagccagcttgtgcgcgcggcagccgggcaccggccagcggtcttcaaggcgatccggggtgggggcacgcacaccaaatcgcaactcgcaaaccagcttgattatctgaccacgaagtccacccatatcgtggactcgagcgggtttctggatggcaaggcaaagcttgaggcaaaggacatcaaggatctgaccgagcgctttgccaagcgatgggatgcaggtttcaaacccaagcttggccagaccacgcacatgctcatgtccttcccgatcggcacgcggggcgaggatgtgcgcgacatcgcaacggatgtggccgagcggttcttccagaccgatgaggggcatttcgattacatcatcgcggtgcatgaggaccgcgatcacccgcatgcgcatctggtactgaaccgccgctcgcaggaaggcgagttcttctttctggggcgcaaccatcgcttcaactatgacgctttccgccttgccatggtcgaggaggccgaaaagtatggcgtgcgcctggaggccacgcgtcgggtggatcgtggggttgtgcattaccccgcccggacccgcgaggtctatgccgcaaaggaagagggccgcgcaccccgcgagcgggaacgcgtgggggccgacctgacgcggacgctggcggagagcgccaataccagaactgtctaccactcgcttgctgcggaggcttcgcgcgaggcccgcgaggatattgccgcagccctcttccgcgcgggcgaggtgctggcgcgcggcgggcaggtggaccgaacaggagatgtgtatatggccgaggatcaaagttttgaggatttgagaagcctctatgcggagaagctcgcgcgggtgcagggcatgattgccgagaagtccgacgcggaacgccccgtgctggaaaaacgcctcatcgagatccagacgcaggtccagcatatgcagccgctcggattacgttcgagcacattgtcagagaccccctcggacggcgggatctattctgaggccaatatcgacgccagccagcgcgagcgactggccgagcccgacctgagagcgcgcattgacgtagcactacggggcaccgggatcagcacatcggaagtggtggcccggatcgagacaggcgcctcaaatgcagcgctcgagcatcaatggatcgctgatgatctctccaaggtggccgaggcgcgcgatctgaacctcgagcgccgcgccgatttggaacaggcgcgcgacattctcaacaatgtgcatgtcgcgcttggcacgctcttggaacgggaggcggtgctgcgccacgatggcgtgattgatgaggcccgcgcggcgcgggtccatctcaccaaagacagaattgaagaggctgccaaggttgtgcggttggagacgtccattagcgagcggggtgaggccttaatcgaaacccgcgccgtggagcgcctcgaggccgagcagcgcgcctacctgcaggagcatccggaccttcttcagagcccggccgatgtcatccgtatggatgaggaaggccgcgccaggattgtcgatcagaagctggctgacctcattggtcgtgagattgaggctgcgcgtcttggtgctcatagccgcacaccgatctctgtggccgtcacgcgggacttgcaggcgcgttatccggatatgccagggcagctggccgaaggtctcggagagacctatgcccatgttcaggacgcccgcctgtcccagcgggaggtgcaggttctccagatgccggaactggaccgtgtgctgactcatgagcgggcgggggagttgtccgcgcccttcgagaccgaagacgagagggacgctttccgaaccgagatcgcgcgggtgctggatgaccgccagttgggccgcctcacatccggcgatgccgatgcgctggaacaggttctcggggaccgcctcgaccggctctatgtcgccaaggtctatctgcaatccgatgccgccacggtcaacacggaggccttgcgccaggtggtcgatgaactcgccgacgccgaatacgaaaaacaccgcgcgacagacgtggatggtgagaccgaacgggggcagatccattga

SEQ ID NO: 4 - DNA, 2007 bp, Artificial Sequence
  TRAG protein [Silicibacter sp.] (+)strand
ttgagcgacgccatgggaaaagcgcggatcgcaactgggatcttgctcgtcacgctggtgaccggggccatgggatataccatcgcctcggcggttctgagccaccaggatctcggcttcggggcggagatcgactttgcttatatcgcgcagaactatctggcgatcctcgatcgccgcccggaggacgcgcaactcatccacctgatcatcggcagcttcgccgctgccggcctgatgctgagccttgccctgtcgggctcggccctcacacgctttggccagacccattggcagtctgcgcgcgagatgaaggccaacgggtttttcggcgctcccgggaccgggttcatccttggtaagctcgggacaccaaaatcccgcgcgaaattcgtctgctcaaaagtcttcccgcacgcgctgatcgtggcccccaccgggcgcggcaagaccacgggcttcgtcattccaaacttgctgacctggcaaggctccgccgtgacgctcgatgtgaagggggaatgtttcgaggccacggcgcgccaccgcgccgcccagggcgacaaggtctatcgctttgctccgacggattgggagggcaagcgcacgcatcgctacaacccgctcttgcgcatctatcaactgaaagatcccgcgcgccaacagatggagttgcaacttcttgctacgcttttcttacagagcgacaacgaccgggtgcagggcctcctcaaaggcgggattgatctctttgtggcagcaggcctgctggcgttccagcgcaagcgtccgaccttgggcgagatctaccgcatcgcggcctcgggcgggaacaagcagaaggagtatttcgcgcggggccatgaagttgacaacagggcggccaagctgatcttcacgcggctggcgtccaccaacaacgatactctgacgtcttatgtttcactcctgatgacctcagggcttgatcaatggcagaaccccgcgatcgatgaggcgacggcagtgtcggatttcgacttccggacaatccgcaaaaagcccttctctgtttatctcgtagtccagccgctgatggtcaaaccacttgcccctctgatccggctctttttctccgatctcctttcggcgatgcaggaaaaggaccctgggccggatgagccgtggcctgtgatgatcatgctcgatgaattcaaccgtcttggcaaaatgcctatcgtggtcgaaagcatcgagaccctccgcagctatagcggtcatctggccgtcgtcacccagacgattcccgccctcgatgaaatctatggtgagaatacccgccgagccctgcagggcaacgcaggggtaaagctctacctaaccccgtctgacgaaaaaaccgtcgaggagctgagtaaggcggtcggcaagaccacaaagaccgtggtcacgcggtcgcaatccatcggcaagaaccccttcgagggccgcagccaatccacacggaccgaagaaagctccttgcttcctgaagatgaagcacgccgcctgccactcgacgagatcgtcatggtcatcgatgcccaaatgccggtccgggcgaagcgaatccagtattttgacgaccgcctgttcaaaacgatccatgatgcacagacgggagacttgccgtttccagagccggggggcgcgcagggtaagctgccacttactatgcgcgcgatgccgatggcaccgccaccggacgagtcaagcggacccgaggccgacggtaaggccgcacgccagactgctgacggccaatcgtctgggccatctggcgctgttcccaagaagaccgcgcccatcgttcaagctgtgatcgccgaggcgcagcgacagatggaaatggatcttgaaggtgcagttgctgacgctgaggccgcgcgcatcgttgatgaggcccagatgcgctccgctgtcgatggtttgaacgacatggaagctatgctgcaggaggatcgcggtcaaaagctggttggtcggtag

SEQ ID NO: 5 - DNA, 294 bp, Artificial Sequence
  VIRB2 type IV secretion [Silicibacter sp.] (-)strand
atgaagcacatttcacacctattcgtcgcctctttggcgctcttcctgctcattgccgaacccgcccttgcgcaaagcatcgatctctcgccgattcagagccttctacagggtatcgtcgatgcgttgaccggcccgctcggcgtggtgatcgccacgcttgccgtgctgggcgttttcctcagctggttctttaacatcatcgatctgcgccaggcgctctgggtgcttgtgggcatcgccggcgtcgctgccgcccccaccatcgtcgccgcggttttcgccggtggctga

SEQ ID NO: 6 - DNA, 279 bp, Artificial Sequence
  Type IV secretory pathway, VirB3-like [Silicibacter sp.] (-)strand
gtggctgagcgctcgcctctcttcctcggcctcgtgcgcccgcccaagcttttgggcttgcccatcatgtacgcgatggtctggctcttcggctcagtgcttctcttcgtctggatccaacacatcgtggtgttgggcgtaaccgcctttctctatccagtgctctggaaagccgccgactgggatccgcgtttcatcgacgtgatgatgaccgcgctgcaggagacgccccccacgcgaaaccgctccatccatggcggggacagctatgccccgtga

SEQ ID NO: 7 - DNA, 2376 bp, Artificial Sequence
  CagE, TrbE, VirB component of type IV transporter system [Silicibacter sp.] (-)strand
atgccccgtgatgacgcccgtaaagatgcgctcgatctccgcacgatgacaccggactggtatagccgcgaaacccgcctcgcgcatatgctgccctatgtgagcttagttgatgaccagaccgtgcggacccgggtcaacgagcttttccagtgcatccggttcgatggggtcaacagctacaccacagatgatacctatctcgacaaggtgaccgcgctctttgctcggatcatcgcgcagctggggccggaattcagctactacgtccacaaggtctcaaaggcgatcaaaccggatctggacccaattcgtaaggacagctttgctggagaagttgaccgtctctggcgcaagaaactggagaccagcggcctgcgcgacaagaccctgaccctcaccatcattcaccgcccaccccccaaaagcgtcctgcccttcttgaaccgcagcgctccgaaccggctgaagaaggcaactgagaaacgcctgcgccgattaggcgaggccgtgaacgtattcctgtcaggcttgagcgagctgaacccgcgcattctctctgctgagactggcgagttgatcggctttctgggggctctcaatactggccaggaactgccgctctatccggcgaacacctatggcttcctgtccttcaacgccgccaacacgcgagtgacgtttcaaggcgatcacttcgagctctccgaaggcgtcgtgggacaccgctacggcaagagtttcaccatcggggaatactcggaaggcacctcctgcaccatgttcgacatgctgaacctgccggtcgacatgatcgtcacgcattccttcacgccgatcaattcgaacctcatggccggtcggatcaagcgccagaagcgccagatgcaggccagccaggacgcggccctctcgctgatggaagccctcgacatcgccgccgatgatctcgaggccaagcgccagagctttggtgagcaccacatggtggtgacaatcttctgcgatacgctcgacgagctgcagacgctgagcgccgagatcgtcaacgccgccgccgccgaaggtgttaagatgatcggcgagcgggtcgccgccaaggcgcattacctgagccagcatccgggcaaccaaccgaaacgcgtgcgcgccagtgcgatcaccaatcgcaacttcgcagatttcgcggcgttccatcggacccagctcggcaagccggcagggaaaacaccctggggcaaggtcatcacctatctgcccacacccgaacaaagcgcctaccggttttcctatcacgaacagggtagccccgaaaaagagccgaccagcgggcatacgctcatcatgggacggcccgggtcgggcaagtcggtgctctcggcattcctcatgacgcaggcccgtcgagcaggggcgcggatcttcgtcttcgattaccgtctcggtatggagatggcggtccgcgccaatggcgggcgctacgcatcgcttaaagccgggcagcccacgggcctcaacccgctctggaccgagaccgatgcacgcggcaccgcctggctgtcggactggctcgccacgctgctttatcgcgccgacaagcccctcacacccgcgcagaccaaccgcatccaggaagttgtgcgccagaacgcgcaggccacgaatccggccttgcggaactggcgggatttcgcgtcgctttttgtgtccaccgatgatggcggcgatttgcaccagcgcctgctcgagtggaccgaagagggccgctacggctggattttcgggcaaactctggaagacaccttctcgctcgaaggcgatgtggtaggcttcgatcttaccggcattctcgacagtgaggccgagaaggaacgcatggcggtcctctcctatctcttccgccgggtcgagcgggagatcgaagaccgccgtcccaccatcatcgtgatcgacgaggcgtggaaggcgctcgacaacgcgtatttcgcagagcggctgtctaactggctcgtgaccgcgcgcaagcagaacaccgtcgcggtgatgatgacgcaatacgccagccagctcgagcgcacccggaccggcaagaccatcgtcgaggcggtgcccacgcaaatcctgctcccaaacatccgcgcccatgccgccgattacgcgatgctgaacctctatgagaaggagctcgacgttcttctcaacaccggcagcgacagccgccttgcgctcatccgcgacgaccagggatccatcgtcgtcgatgccgatctgagcgccctcggacccaatctcaccatcctcggcggcatggaaacaggcgaggccctcgtcggttccgattaccgcaaccgcccggacttctggaggctttcatga

SEQ ID NO: 8 - DNA, 1155 bp, Artificial Sequence
  SLT [Silicibacter sp.] (-)strand
ttgaagtctaaactgccccatattctcgtgctttgcctgctgcccgaaatcgccctttcccaaggcgtgccgaccaatgacagcgggcttactgcacgtgacatcgtcgagaccggtgaccgggaggcagaccttgccatccaggctaacaagctctccgtgcgcgaacttatcgctgagatcgagcgcgaacagctggaaacactgcagcgcatcctcgatgcccaaaccagcttcggcggccaaggcctacccgcgatggtttcagggctggaaaacggaagcggcgatccagcccgttccgtcgaagcggtctatggcaatgccgagatcgaccccaatcccggcggcgcacagatgttcggggatgcggcagaaaacatcgagcagctcatcatccgcgtcgcccaggaaaccagcgggtttgcgggcgtcggccgcgcgggcctctccccagtccaatggcgagcgctgctgcaggctctcatctggcaggaaagccgcttcaccatcggcgcccgctcaccggtcggcgcctttggcctcacccagattatgcccggtacggccagcgatctcggcatcaacccggaatattatgacagcccctacctgcaggtgcatggcggcgcgcgctatctcgccacccaactcaacaccttcgatggcaatatcatcaacgcgctcgcggcctataacgccggacccggtcgcgtgttcgaatatgggggcgtgccacccttccgcgagacccagcactacgttcaggtcatccccgaacgctacaatctctacctgggccgcatcggcgggatcgaagcgctcggtacgatcgaccccgcgcttctggcaaatgcaaacctctccctcacgggtcatggggcggccttttatggcaacaactcacccgctgcgatcaggcaggccgccctgcgcattgcggacatcgtcgagcggatttccgacaccgaagacgtgcaggaaagcatcgcactcaacacctatgcacgcgccgaaatcgtgcgcctcgtggctgcccgcgtccggctgcaggccgcccgcacccggctgctctccgccgaagagctggcccaggccagcgcccgcatggccaaaggcgcgttcatggattttacgattagggagatagactga

SEQ ID NO: 9 - DNA, 810 bp, Artificial Sequence
  hypothetical [Silicibacter sp.] (-)strand
atgagagatttgctcgtgaggatggcattggccacgacgcttgggatcggtctgcatctcggcaccctgtccgctgccgtggcgcaaggtgtgccggtcgtcgacacccagaatattgcgcaaaacatccagcagctccggcagatgatcgaagacgagatcctgcaaaacgagcagctgacgcagctccgcgaacagcttgccacactcacggaccaactcgcggagctgcaacgaacctacgaagcacttacccgtcttgctgaacttcccgaaatcatccgcaccgagatggaggatgagctgaatggccttctcgaccaggagttcggggacatcctcgccaccatcgaggccatcaagacaggcgacttctccgacctgtccggctccggtgcgggcgagatcgaaacccagatggaccgggtgctagccgatctcggatttgacgacgacaccctctccgagatggccaccagcggaaatcccggggccaatcgtgtggcgacacaagcgacgaccggcgcgctcgtctcggcagctgcccagaacagttatgaagacgcaggccaatcgctggaacgcgtcgacaggctggtcggtctcatcgacgacatggacgaactcaaggaaagcatcgacctcaacacgcgggtgacggcggaactggcaattgcgctcgtcgccatgtggcagctcgaagcggtgcagaccgtgggcgacggcacaggcggcgtgatcgatgccgcaactatcgccgaggagcagcggtttatggacttcacgctgcccgagttgcgggcagactga

SEQ ID NO: 10 - DNA, 654 bp, Artificial Sequence
  VirB8 [Silicibacter sp.] (-)strand
gtggcgagtgaacaagaaatcatcgaagaagagctggtctatggtgcgctgcgccgcgaacggctctggcagcgccttgggctcatcgggctcatcttcggcattctcggatgcctgagcgcggcgactgtcgcaattctcgatgtcgatccgccgcctgtggtcgtgccctatgatcccgcaaccggctttgcactccccgaagcctcggtgggcgcctcctcggtgaccgccaaccaggcgatcatcgaggcggaagtcttccgctatgtgaccgaccgggaggtctacaaccagctagacaacgatctgcgcatccgcagcgtcctgcgccgctcggacggagctgccgagagcaggctgcgccagatctggaacagcgccaacgagaattatccgccgacggtctatggccccaatgccaggcttgatgtcgaaatcctcagcatcaaccggatcggcaccaaccgcgccacggtccgactgcgcaagcgcctgacgtcaatcaatggcgttcagacaggccttttcaccgccacgcttctcttcgagttccgccccgagacccgccgctccatcgatgaggtctggaccaatcccttcggcttcacggtcctcgaatattccatccgctccgacagattggagaattga

SEQ ID NO: 11 - DNA, 696 bp, Artificial Sequence
  Conjugal transfer protein TrbG/VirB9/CagX [Silicibacter sp.] (-)strand
ttgttcccagttcgacttttcttcttgctgatagccctgttgcccggcctcgcccttgccgaagccatcccgcgcggcggtcccaatgacaatcgggtgcgactggccacataccaggaaggtcaggtttatcgcctcaatgtctcgctgacccatgtgaccaccatcgagttcggggacggcgagagcatccgttcgatcatcgcaggcgacacggaaggcttcgagattgacggcgtgccgggcgggcaagccttcgcgatcaagcccgtcgcgcgcggtgtccataccaacgtgaccgtctataccagccgccgcagctactatttcaacgtccaggaggtccgcagtccgaccttttacgtggtgcaattccgctatccggaggacgatacgcgcccgacccgggccatcgccgcccaagcgccgaactacaattacggcgccagcgcgcggaccgagttcaccccgacccgggtctgggatgacgggaccttcacgtatttcgaattccctcggaacgcgcccgtgcccgcaatctttcgttacgcgaatggccgtgaacggacggtcaacacgcaagcgaccgagaatggcgtgatccgggtttccggggtgaacaggcaatgggtgttgaggatcggggaagaggtggtctgtatcgaggccacaccacctgcgggggtaggctcatga

SEQ ID NO: 12 - DNA, 1446 bp, Artificial Sequence
  Bacterial conjugation TrbI-like protein [Silicibacter sp.] (-)strand
atgggtgttgaggatcggggaagaggtggtctgtatcgaggccacaccacctgcgggggtaggctcatgagcgataccggaaacgcggacctcgagaaacgtctcgctgccctggagcaaggcaagggcgctggttcgccccctgccccacggcgctcaccgctgctcgctttggtcgtcgtcctcgtgatcggcgcgggcggtgcgttgctgtatctcctgtcccgacccgaggaagaggaagcccttctcacggccacgccggacgtgttccagaacgaaggcgacgggttcggcgccatcgagaccttgcccccgcgcgagcccgaggttgtgttcgtcgcacccgatccgatcgaacccaatgctgagcttttggcgcggatcaccgccctgcaggctcagatcgaggaattgcgcaacgcccctgaaccggtcgtcgaggaagacaccgccgccgccgaggcgatcgacgcgctgaccgctcagatcgctgcgctgcaaaccgcgtcggaagccgcgcaacagcagtttcgcgatgaactcacggcgcgcgatcgcgagctcgagcaactccgcatggacctcgaacttgcgcagctcgaagccaaccgcccccttccggcacccatcggccccaccgaggacgagttgcgcgcgcgggaagaagaacggctgcgccgcgaggaagaagcacgacggctcgcggaacttgaacgccgcgccgcggaggagcgcgcgtttcaggagcgccgcatcacctcgcccaccattgcctttggtggcacgtccggtgcgaatgagacggcgctgaccgagcgcacctttggcgaagtgacggatttcgtgttgaacggtgcgctgccctccaccgtgacgcaggcagaagtgatcgccaatccctccaacaccatcattcagggcacgatgatccaggccgtcatggaaaccgctctcgatagcgccctgcccggccaaacgcgtgctgttgtctcggaagatgtctttagcttcgacgcttcccgcctcctgatcccacgcggctcccgtctcatcgggcgttatcgttcgggggtcgatatcgcgcagcgccgggtcaccatcgcctgggaccgggtcatcttgcctgacaaccagacgatccagatcagctcattcgggggcgatgaacttggccgttccggcgtgaccggctttgtcgacacccggtttgatgagcgcttcggctcagcggcgttgatttcgctgatttccgccgcgccaagtgccgccgctgcaaatgtgcaggatgagaccgcagcggatgtgctcgaagacgtgggcgatgatcttgccgatgctacggacagcgtgatcggcgattacctttcgatcggtcccgtcatttatgtggaccagggcgcgcgcgtcacggtgatggtcgaccgcgatctggagattttctga

SEQ ID NO: 13 - DNA, 987 bp, Artificial Sequence
  Bacterial type II secretion system protein E [Silicibacter sp.] (-)strand
atgtcgctgagctatctccagacctcgcttgatcggatcgacgccgccgcccgcgacgatgttatcgagatctgcatcaatcccgatggcagctgctggggtgaattccagggcgatcacttcatgcgaaagctggaccaggcgttgaccgcaacggaagtgaaagacctcggcaaccagattgcctcctccgcaaacaccaccatgagcaaggaccgccccatcgtctcggtctcaatcacttacaagggtcgcccgatccgcgcccaggttatcacccctcctgcagtgctctcagccatgtccatcagccttcggttcttttcaagcttgccgctcgacgggatcgcactcgactttctctatggcaaggaacgcaagcttgaaaaactccgcctcaagaaaacccgggaactccgcgaggtggtggcggcgggtgtgatcgatgatgccctcgccttctgcgtcgacaacaagctcaacatgatagtctcgggcggcacctccaccggcaagaccgtcgccgcgcgcaagatcctctctcatgtgcctgctgacgaacgcatcgtcaccatcgaggaagccgccgagcttctgccgacccagccaaatgccgtgacgctcatcgccaatcgcgacgcggaattccagaccgccgatgtgctgctcactgccacgctgcgcatgcgccccgaccggatcatcctgggcgaggtgcggggaaaagaggccatgacgttcctcgaggcgatcaacacaggtcatggcgggtcaatgaccacgcttcacgccgaaaccccgcaactcgccgtgcagcgcctcgcaatcgccgcgctcaaaaccgagatcccgatgacctatgccgacatgatccagtacatcgagaactccattgacgtgatcatccaggccgggcgccatgacggccgacgcggcatcacagaattctacctccccggcgcaaccgagatcggagtttcccaatga

SEQ ID NO: 14 - DNA, 1308 bp, Artificial Sequence
  TrbL/VirB6 plasmid conjugal transfer protein [Silicibacter sp.] (-)strand
atgagcgtcgtcacttatttcgttgaaacctcccagggctatctcgacaccgcagcagaaacccagttcgggtcggtcgcggcaacggtcggcacgcttctcgtcctgggaacaacgctcgtggtgattctcgtcttcgtgaacatgatctaccaatacaaggcgatggacggccgcacggccttctggctcgcggtcaagatcgggttgatcgggatatttgcaaccaactgggtgcagttcaacgcgctctcctccgccatcctagctggcatcgacagcattgcgggggcgctcgtggcttcggtcggcggtggaactcctggcccttctggaactttctccgaagaattcgaccgtttgatcgccgagttgggggactacttgaacgccgcaggttcagaattgaactggatggccggcgccatgctcgacattgtcggggtcctcttgctctcgatcctcggcgggctggccgccttcatccttgtggcgtcccgcctgatgatcacacttctaatcgggatcgcgccggtgatgatcttcctcaccctcttcgaggtgaccaaagattacttcgcacgctggctgtcggcactggtttcctttgcactctacccaatcgtcgtcgcaggggtattcgcaacgatcactggcgtctcttccgctctgatcggtgagcttggcgacccggaaggggctccaaacataggcgcgctcatccccttcttcatgatggtcctcatggccaagggcttcatcattgccacgcccttcatcgtccgcgcgatctccggaaacatcatgatgcccgccctctccggtggtctcagcggcggctacagctttgcccgcgccgcaatgggcagccagcaggcctacaatcgctacctgaccggtggggcaagcggtgcggaatatgcagccctcagagcgcggcagttcttcggtatgcaagcgttgccaagcagatcgaactcagcaggcagaccaacagatgtgccagcaagcagtgtgactggaaccggtacccgtatgctggcacagctttcaaggttggggcgtctcggtaaacggtaaactgcccgtgataagcgggaggaaggtgtggatgacgtcaagtcctcatggcccttacgggttgggctacacacgtgctacaatggcagtgacaatgggttaatcccaaaaaactgtctcagttcggattggggtctgcaactcgaccccatgaagtcggaatcgctagtaatcgcgtaacagcatgacgcggtgaatacgttcccgggccttgtacacaccgcccgt

SEQ ID NO: 15 - DNA, 16 bp, Artificial Sequence
  oligonucleotide primer
atggctgtcgtcagct

SEQ ID NO: 16 - DNA, 55 bp, Artificial Sequence
  oligonucleotide primer
cgcccgccgcgccccgcgcccggcccgccgcccccgccccacgggcggtgtgtac

1. An isolated Silicibacter sp. microorganism comprising a 16S ribosomal subunit nucleic acid sequence selected from the group consisting of:
(a) a nucleic acid sequence that has more than 95% identity to a nucleic acid sequence of SEQ ID NO 2; and
(b) a nucleic acid sequence fully complementary to a nucleic acid of (a).

2. A Silicibacter sp. delivery device, selected from among (i) a Silicibacter sp. delivery device for delivering a nucleotide sequence encoding a protein of choice for expression by an algae, the delivery device comprising a Silicibacter sp. microorganism comprising SEQ ID NO: 1, and (ii) a Silicibacter sp. delivery vector for delivery of genes from a bacterium to plant cells, the delivery vector comprising a Silicibacter sp. strain comprising: vir genes whose function is involved in the transfer of DNA from the bacterium to plant cells, wherein the Silicibacter sp. is TM1040 strain.

3. The isolated Silicibacter sp. microorganism of claim 1, comprising a 16S nucleotide sequence of SEQ ID NO: 2.

4. A protein of choice production system, comprising algae transfected with a recombinant Silicibacter sp. strain, wherein the Silicibacter sp. strain comprises a nucleotide sequence encoding for the protein of choice and at least one nucleotide sequence selected from the group consisting of SEQ ID NO. 3, SEQ ID NO. 4, SEQ ID NO. 5, SEQ ID NO. 6, SEQ ID NO.7, SEQ ID NO. 8, SEQ ID NO. 9, SEQ ID NO. 10, SEQ ID NO. 11, SEQ ID NO. 12, SEQ ID NO. 13, and SEQ ID NO. 14.

5. (canceled)

6. A method for delivering a nucleotide sequence encoding a protein of choice, the method comprising the steps of:
inserting nucleotide sequences encoding for the protein of choice into plasmid comprising at least one vir genes of Silicibacter sp. TM1040 strain of SEQ ID NO. 1;
infecting marine algae with the Silicibacter sp. strain and maintaining suitable condition for expressing the protein of choice by the marine algae; and
recovering the protein of choice.

7. A method for producing a heterologous peptide in an algae cell, the method comprising the steps of:
(a) transforming the algae cell with at least one nucleotide sequence selected from the group consisting of SEQ ID NO. 3, SEQ ID NO. 4, SEQ ID NO. 5, SEQ ID NO. 6, SEQ ID NO.7, SEQ ID NO. 8, SEQ ID NO.9, SEQ ID NO. 10, SEQ ID NO.11, SEQ ID NO. 12, SEQ ID NO. 13, and SEQ ID NO. 14 and a gene encoding the heterologous peptide;
(b) culturing the transformed algae cell under conditions that allow for expression of the gene encoding the heterologous peptide, thereby obtaining the peptide.

8. An antibacterial compositions comprising (i) isolated Silicibacter sp. TM1040, or (ii) extracts and/or cell-free filtrates obtained from culture supernatants of TM1040 having antibacterial activity.

9. The antibacterial composition of claim 9, comprising extracts and/or cell-free filtrates obtained from culture supernatants of TM1040 having a potent antibacterial activity.

10. The antibacterial composition of claim 9, comprising extracts and/or cell-free filtrates obtained from culture supernatants of TM1040 having a potent antibacterial activity in killing Mycobacterium marinum, Vibrio anguillarum, V. coralliilyticus, and V. shiloi bacteria.

11. A method for treating or preventing bacterial diseases, comprising administering Silicibacter sp. TM1040 as a probiotic composition or as an antibiotic composition.

12. The method according to claim 11, characterized by one or more compatible conditions (a)-(d) wherein:
(a) the Silicibacter sp. TM1040 is in a form including a liquid culture, wet cell pellet, dehydrated cell pellet, or supernatant fluid from a culture of TM1040;
(b) the Silicibacter sp. TM1040 is in a form applicable for coral reef maintenance or in commercial aquaculture of fin- and shellfish;
(c) the Silicibacter sp. TM1040 is added to or cultured with greenwater in aquaculture feeds or mixed with algal feed prior to feeding; and
(d) the Silicibacter sp. TM1040 is provided alive, frozen, or dehydrated to be revived upon rehydration.

13. (canceled)

14. (canceled)

15. (canceled)

16. The method of claim 11, comprising administering Silicibacter sp. TM1040 as an antibiotic composition.

17. A method for producing antibacterial extracts from Silicibacter sp. TM1040 by fermentation, the method comprising:
a) culturing the Silicibacter sp. TM1040 in a culture medium suitable for the growth of the bacterium and production of antibacterial extract; and
b) separating the extract from the culturing medium.

18. The method according to claim 17, wherein the Silicibacter sp. TM1040 is grown under shaking and aeration to increase production of antibacterial extracts.

19. The antibacterial composition of claim 8, comprising a biofouling/biofilm inhibitor comprising a sufficient amount of TM1040 bacteria or extract therefrom to prevent or reduce the accumulation of other organisms on submerged marine surfaces.

20. The biofouling/biofilm inhibitor of claim 19 that is as adapted to be applied to ship hulls, sonar domes, or any underwater surface.

21. The antibacterial composition of claim 8, comprising a biofilm that produces antibacterial activity, preventing the attachment of other bacteria, comprising Silicibacter sp. TM1040.

22. The biofouling/biofilm inhibitor of claim 19 that is as adapted to be added to paints or other materials applied to submerged surfaces.

23. A recombinant bacteria comprising a nucleotide sequence encoding for the antibacterial agent of Silicibacter sp. TM1040 that is as adapted to be expressed by a compatible host bacteria.

24. The recombinant bacteria according to claim 23, wherein the host bacteria is E. coli.

25. The method of claim 11, wherein the Silicibacter sp. TM1040 is adapted to be expressed by an E. coli host, and the E. coli is introduced into mammals for expression of the antibacterial agent of Silicibacter sp. TM1040.

26. (canceled)

27. (canceled)
